(19) United States
(12) Patent Application Publication
(10) Pub. No.: US 2016/0237449 A1
(43) Pub. Date: Aug. 18, 2016

(54) TRANSGENIC PLANTS FOR NITROGEN FIXATION

(71) Applicant: UNIVERSITY OF BREMEN, Bremen (DE)

(72) Inventors: Barbara Reinhold-Hurek, Bremen (DE); Thomas Hurek, Bremen (DE); Liwei Hu, Zhengzhou, Henan (CN); Qi Wang, Hangzhou, Zhejiang (CN); Haiyuan Yang, Nanjing, Jiiangsu (CN)

(73) Assignee: University of Bremen, Bremen (DE)

(21) Appl. No.: 15/021,928

(22) PCT Filed: Sep. 15, 2014
(86) PCT No.: PCT/EP2014/069624

§ 371 Date: Mar. 14, 2016

(30) Foreign Application Priority Data
Sep. 13, 2013 (EP) 13184351.8

(51) Int. Cl. C12N 15/82; C12N 9/02; G01N 33/84; C12Q 1/68

(52) U.S. Cl. CPC C12N 15/8261; C12N 15/8271; C12Q 1/6895; C12N 9/0095; G01N 33/84; C12Q 2600/13; C12Q 2600/158; C12Y 118/06001; G01N 2333/415; G01N 2458/15; G01N 2560/00

(57) ABSTRACT

Provided are genetic material and nucleic acid sequences useful in increasing yield, biomass, growth rate, vigor, nitrogen use efficiency and/or abiotic stress tolerance, preferably tolerance to nutrient deficiency of a plant. Specifically, the improvement of nitrogen fixation properties in cultivated plants is described.

### FIELD OF THE INVENTION

[0001] Generally, the present invention relates to genetic material and nucleic acid sequences useful of increasing yield, biomass, growth rate, vigor, nitrogen use efficiency and/or abiotic stress tolerance, preferably tolerance to nutrient deficiency of a plant. Specifically, the present invention relates to the improvement of nitrogen fixation properties in cultivated plants. The present invention is concerned with transgenic plants, methods of their manufacture and uses of such plants. Also, the present invention relates to methods useful in the manufacture and assessment of such plants. Specifically, the present invention pertains to the field of nitrogen fixation and allows imparting nitrogen fixation properties or enhancing such properties in a plant.

### BACKGROUND OF THE INVENTION

[0002] Plant nutrition is essential to the growth and development of plants and therefore also for the quantity and quality of plant products. A huge amount of fertilizers is used worldwide to support plant growth and development. One of the nutrients of major importance is nitrogen, which is usually the rate-limiting element in plant growth. Nitrogen is part of numerous important compounds found in living cells, like amino acids, proteins, nucleic acids and chlorophyll. Because of the high nitrogen requirements of crop plants, nitrogen fertilization is a major worldwide agricultural investment, with approximately 80 million metric tonnes of nitrogen fertilizers applied annually. Nitrogen fertilizers are predominantly made from natural gas by a high energy demanding process. Apart from requiring approximately 1% of the world's total energy supply (Smith B. E., Science 2002 (297), 1654-1655), production of artificial nitrogen fertilizers e.g. by the Haber-Bosch-Mechanism also uses up non-renewable fossil fuels. Nitrogen fertiliser is thus perhaps one of the most energy-intensive inputs to agricultural production worldwide. One third of nitrogen fertilizer is lost by emission of greenhouse gases and leaching, causing adverse environmental impacts. For example, N₂O is a potent greenhouse gas with a relative global warming potential 300 times higher than that of CO₂. Roughly 10% of the human induced greenhouse effect was attributed to N₂O produced predominantly by agricultural management practices but also by industrial processes (Crutzen et al., Chem. Phys. Discuss. 2007 (7), 11191-11205).

[0003] Because of the high costs of nitrogen fertilizer and the adverse effect of their use, it is desirable to develop strategies to reduce the consumption of artificial nitrogen fertilizer without impairing yield and plant health.

[0004] Traditionally, an alternative to the use of artificial nitrogen fertilizers is three-field crop rotation which uses leguminous plants as green manure. However, it is not the plants themselves which are able to biologically fix atmospheric nitrogen (N₂, also shortened to N in further description); only procaryotic microorganisms comprise nitrogenase, the enzyme complex required for biological nitrogen fixation. Leguminous plants use such nitrogen fixing microorganisms as endosymbionts, particularly microorganisms of genus Rhizobium, e.g., Rh. meliloti. Other nitrogen fixing microorganisms are actinomycetes of genus Franckia, which produce root tubercles for example in plants of genera Hippophae, Ceanothus and Casuarina, particularly Casuarina equisetifolia. Further nitrogen fixing microorganisms are found in cyanobacteria, for example of genus Anabaena like Anabaena azollae, and Nostoc.

[0005] Unfortunately, cooperation of plants and microorganisms for biological nitrogen fixation is a complex process requiring coordination of metabolism of both the plant and the microorganism. The relationship between plant and microorganism is on the brink of parasitism, as there is a constant danger that microorganisms could just consume their host instead of merely imparting beneficial nitrogen fixation to the host. Thus, a profit of plants from biological nitrogen fixation does not occur in high amounts in connection with most important agricultural plants, particularly those of family Poaceae, further in particular of subfamily Ehrhartoidae, Pooideae and Panicoideae, Chloridoideae, even more in particular of the tribe Oryzeae, Triticeae, Paniceae, and Andropogoneae, and even more in particular of genus Oryza, particularly O. sativa and O. glaberrima (cultivated rice), genus Hordeum, particularly H. vulgare (barley), genus Secale, particularly S. cereale (rye), genus Triticum, particularly T. aestivum (bread wheat) and T. monococcum, genus Triticosecale (triticale), genus Saccharum, particularly S. officinarum, S. robustum, S. sinense, S. barberi, S. edule and S. spontaneum (sugar cane), genus Eleusine, particularly E. coracana, genus Sorghum, particularly S. bicolor (Sorghum), genus Pennisetum, P. glaucum (millet) and genus Zea, particularly Z. mays (maize).

[0006] Unfortunately, the use of green manure is not always possible, for example in the cultivation of rice. Also, green manure cannot be planted together with other crops, thereby decreasing the annual crop yield per hectare. Furthermore, it has been found to be impossible so far to transfer nitrogen fixing organisms to species which are not already adapted to co-cultivation with such microorganisms. Either the respective plants will suffer from infections by such microorganisms, or they will not sustain growth of the microorganisms.

[0007] It was therefore an object of the present invention to provide means for reducing the need for artificial nitrogen fertilizers in agriculture, in the cultivation of rice, barley, rye, wheat, triticale, sugar cane, sorghum and maize, most particularly in rice.

### SUMMARY OF THE INVENTION

[0008] The present invention generally relates to methods of increasing yield, biomass, growth rate, tolerance to low nutrient soil, vigor and/or nitrogen use efficiency of a plant, comprising introducing isolated genetic material of Oryza longistaminata to a target plant or plant cell. For this aim, the present invention concerns methods for producing a transgenic plant cell and a transgenic plant, comprising the step of introducing genetic material of Oryza longistaminata into a plant cell of a different species to obtain a plant cell or plant, respectively, thereby providing a habitat for nitrogen fixing microorganisms, or thereby modifying or increasing the biological nitrogen fixation of a community comprising the plant cell, or plant respectively, and nitrogen fixing microorganisms. The isolated material may be introduced by several means into the target plants or plant cells, as defined in detail further below, wherein the target plants or plant cells are selected from the family of Poaceae. The present invention also extends towards polynucleotides and vectors comprising the isolated genetic material and cultivated plants, plant cells or seeds thereof in which said genetic material has been introduced. The present invention further relates to the use of said genetic material for alteration of the association of the root of a plant with a nitrogen fixing microorganism, reducing nitrogen fertilization demand of the plant and/or improving nitrogen sustainability of cereals.

[0009] In detail the present invention relates to:

[0010] [1] A method of increasing yield, biomass, growth rate, vigor, nitrogen gain derived from biological nitrogen fixation, nitrogen use efficiency, abiotic stress tolerance and/or preferably of increasing tolerance to nutrient deficiency of a plant, comprising introducing isolated genetic material of Oryza longistaminata to a target plant or plant cell.

[0011] [2] The method of [1], wherein the isolated genetic material is selected from the group consisting of the nucleic acid sequences set forth in Table 1 or nucleic acid sequences encoding a polypeptide at least 60% identical to an amino acid sequence encoded by the nucleic acid sequences set forth in Table 1.

[0012] [3] The method of [1] or [2], wherein the target plant or plant cell is selected from the group of plants or plant cells, respectively, of
[0013] family Poaceae,
[0014] subfamily Ehrhartoidae, Pooideae, Panicoideae or Chloridoideae,
[0015] tribum Oryzeae, Triticeae, Paniceae or Andropogoneae,
[0016] genus Oryza, Hordeum, Secale, Triticum, Triticosecale, Saccharum, Eleusine, Sorghum, Pennisetum or Zea; and
[0017] Oryza sativa, Oryza glaberrima (cultivated rice), Hordeum vulgare (barley), Secale cereale (rye), Triticum aestivum (bread wheat), Triticum monococcum, Saccharum officinarum, Saccharum robustum, Saccharum sinense, Saccharum barberi, Saccharum edule, Saccharum spontaneum (sugar cane), Eleusine coracana, Sorghum bicolor (Sorghum), Pennisetum glaucum (millet), Zea mays (maize), or hybrids thereof.

[0018] [4] The method of any one of [1] to [3], wherein the genetic material is introduced by amphiploidization, single chromosome addition/substitution, centric translocation and/or homologous recombination.

[0019] [5] The method according to any one of [1] to [4], wherein the genetic material of Oryza longistaminata is introduced to the target plant or plant cell by
[0020] wide hybridization,
[0021] chemical methods,
[0022] microinjection,
[0023] electroporation,
[0024] particle acceleration and/or particle bombardment,
[0025] one or more viral vectors or bacterial vectors, preferably Agrobacterium,
[0026] receptor-mediated mechanisms,
[0027] injection of genetic material into a reproductive organ of the target plant,
[0028] protoplast transformation, and/or
[0029] injection into an immature embryo of the target plant.

[0030] [6] The method according to any one of [1] to [5], further comprising the steps of

[0031] (i) growing a root and/or shoot of the plant or plant cell obtained by the method of any one of [1] to [5] inoculated with a nitrogen fixing microorganism or not inoculated in soil;

[0032] (ii) determining expression levels of nitrogenase mRNA in the plant roots;

[0033] (iii) selecting a plant having higher root-associated expression levels of nitrogenase mRNA than the parental cultivated plant; and/or

[0034] (iv) determining the level of plant nitrogen gained by nitrogen fixation by isotopic, 15N-based methods.

[0035] [7] The method according to any one of [1] to [6], wherein the nitrogen fixing microorganism is a bacterium, preferably of family Rhodocyclaceae.

[0036] [8] The method to any one of [1] to [7], wherein the introduction of the isolated genetic material to the target plant or plant cell imparts, increases or modifies root association of the plant with a nitrogen fixing microorganism, and/or reduces nitrogen fertilization demand of the plant or the plant cell.

[0037] [9] A polynucleotide comprising the isolated genetic material of [1] or [2].

[0038] [10] A vector comprising the polynucleotide of [9].

[0039] [11] The vector of [10], wherein the nucleic acid sequences as defined in [2] are operably linked to heterologous control sequences capable of directing transcription and preferably expression of the nucleic acid sequences in a host cell, preferably plant cell.

[0040] [12] A cultivated plant, plant cell or seed thereof comprising the genetic material as defined in [1] or [2], the polynucleotide of [9], the vector of [10] or [11] and/or obtainable by a method according to any of [1] to [8], preferably exogenously expressing the genetic material.

[0041] [13] Use of genetic material of Oryza longistaminata for imparting, increasing or modifying root association of a plant with a nitrogen fixing microorganism, reducing nitrogen fertilization demand of a plant, and/or improving nitrogen sustainability of cereals.

[0042] Further embodiments of the present invention will be apparent from the description, the figures and Examples that follow.

### BRIEF DESCRIPTION OF THE DRAWINGS

[0043] FIG. 1: Results of polymerase chain reaction (PCR) analysis, showing the detection of nitrogen fixing bacteria in root but not in shoot samples from Oryza longistaminata. A typical result obtained from 5 plants is shown. Plants were grown in a growth chamber in soil from an unfertilized fallow of a rice field in the Carmague, France. Genomic DNA of Azoarcus sp. BH72 is used for spiking of plant samples.

[0044] FIG. 2: Levels of nifH transcript fragments in roots of wild and cultivated species of rice. Asian cultivated rice (Oryza sativa) roots showed significantly lower transcript levels than wild rice roots (O. longistaminata). In interspecific hybids (F1) high transcript levels were retained (multiple t tests with multiple comparison post test; *, P<0.05). Values are means with SD from at least 3 replicates. All values from the rice cultivars were compared to those from wild rice. NifH transcripts were quantified by real-time RT-PCR. The actin gene was used to normalize the quantification of nifH expression.

[0045] FIG. 3: Increasing the capacity for BNF in Asian cultivated rice by wide hybridization with wild rice. Incorporation of ¹⁵N₂ tracer into re-grown shoots of a wild rice species Oryza longistaminata, F1-hybrids, Asian cultivated rice (Oryza sativa) and backcrosses with Oryza sativa. Plants were grown in a gas-tight phytotron chamber and sampled after the 2nd consecutive cut, after growth under a headspace of 0.41±0.15 atom % ¹⁵N excess. In contrast to the O. sativa cultivar and the backcross tested, two different F1-hybrids retained high N2-gain potential similar to wild rice (one-way ANOVA and Bonferroni's multiple comparison post test *, P<0.05).

### DETAILED DESCRIPTION OF THE INVENTION

[0046] Basic plant biochemistry and physiology have provided the means of better understanding of crop production systems in relation to Nitrogen (N) supply. The interactions between carbon dioxide (CO₂) and nitrate (NO₃⁻) assimilation and their dynamics are of key importance for crop production. An adequate supply of NO₃⁻, its assimilation to amino acids (for which photosynthesized carbon compounds are required) and their availability for protein synthesis, are essential for metabolism. An adequate supply of NO₃⁻ stimulates leaf growth and photosynthesis, the former via cell growth and division, the latter by larger contents of components of the light reactions, and those of CO₂ assimilation and related processes. With adequate N, at full genetic potential of a plant, more C-assimilation per unit N would increase biomass. As indicated above, nitrogen fertilization is broadly used in the agriculture achieve adequate N supply, with adverse effects as recited above as well. An alternative would be represented, e.g., by increasing the N assimilation or utilization in a plant cell or a plant, which in turn would exhibit improved nitrogen contents, altered amino acid or protein compositions, vigorous growth characteristics, increased vegetative yields or better seed yields and qualities.

[0047] On the above background, the present invention generally relates to a method of increasing yield, biomass, growth rate, vigor, nitrogen use efficiency (NUE) and/or abiotic stress tolerance, preferably tolerance to nutrient deficiency of a plant, comprising introducing isolated genetic material of Oryza longistaminata to a target plant or plant cell.

[0048] A way for identification of such plants, plant cells and plant lines engineered to possess such improved agronomic characteristics may lay, e.g., in examination of any of following parameters: 1) the rate of growth, measured in, terms of rate of increase in fresh or dry weight; 2) vegetative yield of the mature plant, in terms of fresh or dry weight; 3) the seed or fruit yield; 4) the seed or fruit weight; 5) the total nitrogen content of the plant; 6) the total nitrogen content of the fruit or seed; 7) the free amino acid content of the plant; 8) the free amino acid content of the fruit or seed; 9) the total protein content of the plant; and 10) the total protein content of the fruit or seed. The procedures and methods for examining these parameters are well known to those skilled in the art.

[0049] As used herein the term “increasing” refers to at least about 1%, 2%, 3%, 4%, 5%, preferably at least about 10%, 15%, 20%, more preferred at least about 25%, 30%, 35%, 40%, 45% and most preferred at least about 50%, 60%, 70%, or 80% increase in at least parameter of a plant as compared to a native plant [i.e., a plant not modified by the introduction of the genetic material of the invention or equivalent biomolecules, i.e. polynucleotides or polypeptides obtainable by the expression of the genetic material, e.g., a non-transformed plant of the same species which is grown under the same growth conditions).

[0050] As indicated above, within the method of the According to the present invention, a desired plant is one that exhibits improvement over the control plant (i.e., progenitor plant) by increase of one or more of the aforementioned parameters.

[0051] Generally speaking, the present invention concerns generation of a transgenic plant or transgenic plant cell by introducing genetic material of Oryza longistaminata, which has a high ability to use nitrogen efficiently, to a target plant or plant cell. The introduction of said genetic material reduces the plant's or plant cell's demand for nitrogen fertilization preferably by imparting, increasing or modifying root association of a plant with a nitrogen fixing microorganism and/or increases yield, biomass, growth rate, vigor, nitrogen use efficiency, abiotic stress tolerance, and/or preferably tolerance to nutrient deficiency of the plant or plant cell. In addition or alternatively, in one embodiment, the genetic material is preferably of the strain O. longistaminata Xa21, also known as O. longistaminata IRGC 110404 or CRRI 12156-1.

[0052] In one embodiment, the present invention relates to the method as defined hereinabove, wherein the isolated genetic material is selected from the group consisting of the nucleic acid sequences set forth in Table 1 below or nucleic acid sequences encoding a polypeptide at least 60% identical, preferably 65, 70 or 75% identical, more preferably 80% identical, still more preferably 90% identical, and particularly preferred at least 91%, 92%, 93%, 94%, 95%, 96%, 97%, 98% or 99% identical to an amino acid sequence encoded by the nucleic acid sequences set forth in Table 1.

[0053] In a particularly preferred embodiment of the present invention one or more of the nucleic acid sequences set forth in Table 1 or polynucleotides encoding substantially the same or equivalent polypeptides are introduced into the target plant. As shown in FIGS. 2 and 3 the introduction of one or more of these sequences by techniques such as wide hybridization leads to an increased NifH transcript copy number in the roots and increased incorporation of ¹⁵N₂ tracer into re-grown shoots indicating higher nitrogen fixation in the modified plants (F1-Hybrid in FIGS. 2 and 3)

[0054] According to some embodiments of the invention the isolated genetic material comprises a nucleic acid sequence which is at least about 80%, at least about 81%, at least about 82%, at least about 83%, at least about 84%, at least about 85%, at least about 86%, at least about 87%, at least about 88%, at least about 89%, at least about 90%, at least about 91%, at least about 92%, at least about 93%, at least about 93%, at least about 94%, at least about 95%, at least about 96%, at least about 97%, at least about 98%, at least about 99%, e.g., 100% identical to the nucleic acid sequences as indicated in Table 1 and selected from the group consisting of the sequences indicated in Table 1.

[0055] Naturally, the plant to be modified is not of species Oryza longistaminata. In one preferred embodiment, the plant to be modified is a cultivated plant and/or comprises at least one, two, three, four, five, six, seven, eight, nine, ten or more of the sequences set forth in Table 1. In one embodiment, the subject plant comprises one or more chromosomes or part(s) thereof of the wild type species, preferably comprising one or more of the sequences indicated in Table 1.

[0056] In one embodiment, the present invention relates to the method as defined hereinabove, wherein the target plant or plant cell is selected from the group of plants or plant cells, respectively, of
[0057] family Poaceae,
[0058] preferably of subfamily Ehrhartoidae, Pooideae, Panicoideae or Chloridoideae,
[0059] more preferred of tribum Oryzeae, Triticeae, Paniceae or Andropogoneae,
[0060] still more preferred of genus Oryza, Hordeum, Secale, Triticum, Triticosecale, Saccharum, Eleusine, Sorghum, Pennisetum or Zea; and
[0061] in particular preferred of Oryza sativa, Oryza glaberrima (cultivated rice), Hordeum vulgare (barley), Secale cereale (rye), Triticum aestivum (bread wheat), Triticum monococcum, Saccharum officinarum, Saccharum robustum, Saccharum sinense, Saccharum barberi, Saccharum edule, Saccharum spontaneum (sugar cane), Eleusine coracana, Sorghum bicolor (Sorghum), Pennisetum glaucum (millet), Zea mays (maize), and hybrids thereof, preferably having at least one parent of such species, genus, tribe, subfamily or family. Preferably, the target plant or plant cell is selected from Oryza sativa, Oryza glaberrima or hybrids thereof.

[0062] The genetic material as defined above may be introduced in several forms and by many methods known in the art into the target cells or plants. In one embodiment, the present invention relates to the method as defined hereinabove, wherein the genetic material is introduced by amphiploidization, single chromosome addition/substitution, centric translocation and/or homologous recombination. These techniques are well known in the art; see, e.g., Cox et al., in Critical Reviews in Plant Sciences 21 (2002), 59-91 and references cited therein. Furthermore, methods of constructing and transfecting of artificial chromosomes (chromosome addition) are known in the art and reviewed or described, e.g., in Houben A., The Plant Cell January 20 (2008), 8-10 and Phan et al. Transgenic Res. 16 (2007), 341-51. Chromosome substitution is described for example in Wan et al., Theor Appl Genet 110 (2004), 71-79; and Yano M, Curr Opin Plant Biol 4 (2001), 130-135.

[0063] After a suitable construct comprising the genetic material as defined hereinabove has been made, transgenic plants of interest can be generated using transformation methods well known in the art. The construct according to the present invention can be in general a polynucleotide comprising or essentially consisting of the genetic material as defined hereinabove, for example, a plasmid, a bacmid, a phagemid, a cosmid, a phage, a virus or a chromosome. An exogenous nucleic acid molecule can be introduced into a monocot plant for ectopic expression using a variety of transformation methodologies including Agrobacterium-mediated transformation (Hiei et al., The Plant Journal 6 (1994), 271-282) and direct gene transfer methods such as electroporation and microprojectile-mediated transformation (see, generally, Wang et al. (eds), Transformation of Plants and Soil Microorganisms, Cambridge, UK: University Press, 1995, which is incorporated herein by reference).

[0064] Transformation methods based upon the soil bacterium, Agrobacterium tumefaciens, are particularly useful for introducing an exogenous nucleic acid molecule into a seed plant. The wild-type form of Agrobacterium contains a Ti (tumor-inducing) plasmid that directs production of tumorigenic crown gall growth on host plants. Transfer of the tumor-inducing T-DNA region of the Ti plasmid to a plant genome requires the Ti plasmid-encoded virulence genes as well as T-DNA borders, which are a set of direct DNA repeats that delineate the region to be transferred. An Agrobacterium-based vector is a modified form of a Ti plasmid, in which the tumor inducing functions are replaced by the nucleic acid sequence of interest to be introduced into the plain host.

[0065] Agrobacterium-mediated transformation generally employs cointegrate vectors or, preferably, binary vector systems, in which the components of the Ti plasmid are divided between a helper vector, which resides permanently in the Agrobacterium host and carries the virulence genes, and a shuttle vector, which contains the particular genetic material as defined hereinabove, e.g., an isolated gene of interest bounded by T-DNA sequences. A variety of binary vectors is well known in the art and are commercially available, for example, from Clontech (Palo Alto, Calif.). Methods of co-culturing Agrobacterium with cultured plant cells or wounded tissue such as root explants, hypocotyledons, stem pieces or tubers, for example, also are well known in the art (Glick and Thompson, Methods in Plant Molecular Biology and Biotechnology. CRC Press, Boca Raton, Fla., pp 179-20519, 1993). Wounded cells within the plant tissue that have been infected by Agrobacterium can develop organs de novo when cultured under the appropriate conditions; the resulting transgenic shoots eventually give rise to transgenic plants that comprise the genetic material as defined hereinabove and/or ectopically express, e.g., a polynucleotide and/or polypeptide/protein from there within. Agrobacterium also can be used for transformation of whole seed as described in Bechtold et al., C. R. Acad. Sci. Paris. Life Sci. 316 (1993), 1194-1199, (which is incorporated herein by reference). Agrobacterium-mediated transformation is useful for producing a variety of transgenic seed plants (Wang et al., supra, 1995). Methods Mol Biol. 2012; 847:51-7. doi: 10.1007/978-1-61779-558-9_5.

[0066] A high-efficiency Agrobacterium-mediated transformation system of several rice Oryza sativa L. elite japonica and many indica varieties is described by Ozawa in Methods Mol. Biol. 847 (2012), 51-57.

[0067] Microprojectile-mediated transformation also can be used to produce a transgenic plant that comprises and/or ectopically expresses the genetic material as defined hereinabove. This method, first described by Klein et al. (Nature 327 (1987), 70-73), which is incorporated herein by reference), relies on microprojectiles such as gold or tungsten that are coated with the desired nucleic acid molecule by precipitation with calcium chloride, spermidine or PEG. The microprojectile particles are accelerated at high speed into a plant tissue using a device such as the BIOLISTIC PD-1000 (Biorad, Hercules, Calif.).

[0068] Microprojectile-mediated delivery, also known as “particle acceleration” and “particle bombardment” is especially useful to transform plants that are difficult to transform or regenerate using other methods. Microprojectile-mediated transformation has been used, for example, to generate a variety of transgenic plant species, including cotton, tobacco, maize, hybrid poplar and papaya (see Glick and Thompson, supra, 1993) as well as cereal crops such as wheat, oat, barley, sorghum and rice (Duan et al., Nature Biotech. 14:494-498, 1996; Shimamoto, Curr. Opin. Biotech. 5:158-162, 1994; each of which is incorporated herein by reference). In view of the above, the skilled artisan will recognize that Agrobacterium-mediated or microprojectile-mediated transformation, as disclosed herein, or other methods known in the art can be used to produce a transgenic seed plant of the invention.

[0069] Alternative gene transfer and transformation methods useful in the invention include, but are not limited to liposomes (Caboche M., Physiol. Plant. 79 (1990), 173-176); electroporation (Riggs et al. (1986) Proc. Natl. Acad. Sci. USA 83:5602-5606); chemical-mediated methods (Zatloukal, et al., Ann. N.Y. Acad. Sci., 660 (1992), 136-153); calcium phosphate co-precipitation techniques; micro- or macroinjection (Crossway et al. (1986) Biotechniques 4:320-334); direct DNA transformation, and may involve Ti plasmids, Ri plasmids, or plant virus vectors; receptor-mediated mechanisms (Curiel et al., Hum. Gen. Ther., 3(2):147-154, 1992; Wagner, et al., Proc. Natl. Acad. Sci. USA, 89(13): 6099-6103, 1992) injection of genetic material into a reproductive organ of the target plant (Zhou, et al., Methods in Enzymology, 101: 433, 1983; Hess, Intern Rev. Cytol., 107: 367, 1987; Luo, et al., Plant Mol. Biol. Reporter, 6: 165, 1988; Pena, et al., Nature, 325: 274, 1987); protoplast transformation (U.S. Pat. No. 5,508,184); injection into an immature embryo of the target plant (Neuhaus, et al., Theor. Appl. Genet., 75 (1987), 30-36) and wide hybridization (Kumari et al., Annuals of the Sri Lanka Department of Agriculture 7 (2005), 157-164). These and further plant transformation methods are known to the person skilled in the art, the above references are exemplary only. Such methods are described in detail also in the patent application US 2010/0275332 A1, in the section “Transformation”, paragraphs [0129-0145] on pages 16-17, the disclosure content of which is incorporated herein by reference in its entirety.

[0070] Accordingly, in one embodiment the present invention concerns the method as described hereinabove, wherein the genetic material of Oryza longistaminata is introduced to the target plant or plant cell by
[0071] wide hybridization,
[0072] chemical methods,
[0073] microinjection,
[0074] electroporation,
[0075] particle acceleration and/or particle bombardment,
[0076] one or more viral vectors or bacterial vectors, preferably Agrobacterium,
[0077] receptor-mediated mechanisms,
[0078] injection of genetic material into a reproductive organ of the target plant,
[0079] cytoplast fusion
[0080] protoplast transformation, and/or
[0081] injection into an immature embryo of the target plant.

[0082] Methods using either a form of direct gene transfer or Agrobacterium-mediated transfer usually, but not necessarily, are undertaken with a selectable marker which may provide resistance to an antibiotic (e.g., kanamycin, hygromycin or methotrexate) or a herbicide (e.g., phosphinothricin). The choice of selectable marker for plant transformation is not, however, critical to the invention.

[0083] For certain plant species, different antibiotic or herbicide selection markers may be preferred. Selection markers used routinely in transformation include the nptII gene which confers resistance to kanamycin and related antibiotics (Messing & Vierra, Gene 19: 259-268 (1982); Bevan et al., Nature 304:184-187 (1983)), the bar gene which confers resistance to the herbicide phosphinothricin (White et al., Nucl Acids Res 18: 1062 (1990), Spencer et al., Theor Appl Genet 79: 625-631(1990)), the hph gene which confers resistance to the antibiotic hygromycin (Blochinger & Diggelmann, Mol Cell Biol 4: 2929-2931), and the dhfr gene, which confers resistance to methotrexate (Bourouis et al., EMBO J. 2: 1099-1104 (1983)).

[0084] The genetic material as defined hereinabove may be isolated and/or introduced in several forms into the plants and/or plant cells, for example in the form of a polynucleotide. The polynucleotide of the present invention may comprise or essentially consist of the genetic material as defined hereinabove. It may be, e.g., DNA, cDNA, RNA or synthetically produced DNA or RNA or a recombinantly produced chimeric nucleic acid molecule comprising any of those polynucleotides either alone or in combination. Therefore, in one embodiment the present invention relates to a polynucleotide comprising the isolated genetic material of the present invention or at least one nucleic acid sequence as defined hereinabove, i.e. selected from the group consisting of the nucleic acid sequences set forth in Table 1 below or nucleic acid sequences encoding a polypeptide at least 60% identical, preferably 65, 70 or 75% identical, more preferably 80% identical, still more preferably 90% identical, and particularly preferred at least 91%, 92%, 93%, 94%, 95%, 96%, 97%, 98% or 99% identical to an amino acid sequence encoded by the nucleic acid sequences set forth in Table 1.

[0085] Furthermore, in a preferred embodiment the present invention also relates to a vector comprising the polynucleotide as defined supra. Preferably, the polynucleotide of the invention is operatively linked to expression control sequences allowing expression in prokaryotic or eukaryotic cells. Accordingly, in one embodiment the vector as defined herein above is provided, wherein the nucleic acid sequences set forth in Table 1 or nucleic acid sequences encoding a polypeptide at least 60% identical to an amino acid sequence encoded by the nucleic acid sequences set forth in Table 1 are operably linked to heterologous control sequences capable of directing transcription and preferably expression of the nucleic acid sequences in a host cell, preferably plant cell.

[0086] Expression of said polynucleotide comprises transcription of the polynucleotide into a translatable mRNA. Regulatory elements ensuring expression in eukaryotic cells, preferably mammalian cells, are well known to those skilled in the art. They usually comprise regulatory sequences ensuring initiation of transcription and optionally poly-A signals ensuring termination of transcription and stabilization of the transcript. Additional regulatory elements may include transcriptional as well as translational enhancers, and/or naturally associated or heterologous promoter regions.

[0087] For expression in plants, suitable promoters must be chosen for both the receptor expression cassettes and the target expression cassette. Unless specifically noted, the promoters discussed below may be used to direct expression in plants of either the receptor polypeptides or the target polypeptide. These promoters include, but are not limited to, constitutive, inducible, temporally regulated, developmentally regulated, chemically regulated, tissue-preferred and tissue-specific promoters.

[0088] Preferred constitutive promoters include but are not limited to the CaMV 35S and 19S promoters (U.S. Pat. No. 5,352,605). Additionally preferred promoters include but are not limited to one of several of the actin genes, which are known to be expressed in most cell types. The promoter described by McElroy et al., Mol. Gen. Genet. 231 (1991), 150-160, can be easily incorporated into the receptor expression cassettes of the present invention and are particularly suitable for use in monocotyledonous hosts. Yet another preferred constitutive promoter is derived from ubiquitin, which is another gene product known to accumulate in many cell types. The ubiquitin promoter has been cloned from several species for use in transgenic plants (e.g. sunflower—Binet et al., Plant Science 79 (1991), 87-94; maize—Christensen et al., Plant Molec. Biol. 12 (1989), 619-632). The maize ubiquitin promoter has been developed in transgenic monocot systems and its sequence and vectors constructed for transformation of monocotyledonous plants are disclosed in patent publication EP 0 342 926. The ubiquitin promoter is suitable for use in the present invention in transgenic plants, especially monocotyledons. Further useful promoters are the U2 and U5 snRNA promoters from maize (Brown et al., Nucleic Acids Res. 17: 8991 (1989)) and the promoter from alcohol dehydrogenase (Dennis et al., Nucleic Acids Res. 12: 3983 (1984)).

[0089] Tissue-specific or tissue-preferential promoters useful in the present invention in plants, particularly maize, are those which direct expression in root, pith, leaf or pollen. Such promoters are disclosed in U.S. Pat. No. 5,625,136, incorporated herein by reference in its entirety. Also useful are promoters which confer seed-specific expression, such as those disclosed by Schernthaner et al, EMBO J., 7 (1988) 1249-1255; anther-specific promoters ant32 and ant43D disclosed in U.S. Pat. No. 5,477,002, incorporated herein by reference in its entirety; anther (tapetal) specific promoter B6 (Huffman et al., J. Cell. Biochem. 17B: Abstract #D209 (1993)); pistil-specific promoters such as a modified S13 promoter (Dzelkalns et al., Plant Cell 5 (1993), 855).

[0090] Also useful in the present invention are chemically-induced promoters. Particular promoters in this category useful for directing the expression of the receptor polypeptides or target polypeptide in plants are disclosed, for example, in U.S. Pat. No. 5,614,395, incorporated herein by reference in its entirety.

[0091] The 5′ regulatory region of either the receptor expression cassette or the target expression cassette may also include other enhancing sequences. Numerous sequences have been found to enhance gene expression in transgenic plants. For example, a number of non-translated leader sequences derived from viruses are known to enhance expression. Specifically, leader sequences from Tobacco Mosaic Virus (TMV, the “Ω-sequence”), Maize Chlorotic Mottle Virus (MCMV), and Alfalfa Mosaic Virus (AMV) have been shown to be effective in enhancing expression (e.g. Gallie et al., Nucl. Acids Res., 15 (1987), 8693-8711; Skuzeski et al. Plant Molec. Biol., 15 (1990) 65-79).

[0092] Various intron sequences have been shown to enhance expression when added to the 5′ regulatory region, particularly in monocotyledonous cells. For example, the introns of the maize Adh1 gene have been found to significantly enhance the expression of the wild-type gene under its cognate promoter when introduced into maize cells (Callis et al., Genes Develop., 1 (1987), 1183-1200).

[0093] In addition to promoters, a variety of 3′ transcriptional terminators are also available for use in the present invention. Transcriptional terminators are responsible for the termination of transcription and correct mRNA polyadenylation. Appropriate transcriptional terminators and those which are known to function in plants include the CaMV 35S terminator, the tml terminator, the nopaline synthase terminator, the pea rbcS E9 terminator and others known in the art. These can be used in both monocotyledons and dicotyledons.

[0094] In addition to incorporating one or more of the aforementioned elements into the 5′ regulatory region of a target expression cassette, other elements peculiar to the target expression cassette may also be incorporated. Such elements include but are not limited to a minimal promoter. By minimal promoter it is intended that the basal promoter elements are inactive or nearly so without upstream activation. Such a promoter has low background activity in plants when there is no transactivator present or when enhancer or response element binding sites are absent. One minimal promoter that is particularly useful for target genes in plants is the Bz1 minimal promoter which is obtained from the bronzel gene of maize.

[0095] Another advantage of the quantification method of the present invention is that it can be used to select plants having a low demand of artificial nitrogen fertilization. Accordingly, in one embodiment the present invention also relates to the method of the present invention as defined herein above further comprising the steps of
[0096] growing root(s) and/or shoot(s) of the plant or the plant cell inoculated with a nitrogen fixing microorganism or not inoculated in soil;
[0097] determining expression levels of nitrogenase mRNA in the plant root(s);
[0098] selecting a plant having higher root-associated expression levels of nitrogenase mRNA than the parental cultivated plant; and/or
[0099] determining the level of plant nitrogen gained by nitrogen fixation by isotopic, ¹⁵N-based methods.

[0100] As indicated above, it is not the plants themselves which are able to biologically fix atmospheric nitrogen (N2, also shortened to N in further description); only procaryotic microorganisms comprise nitrogenase, the enzyme complex required for biological nitrogen fixation. Therefore, it is envisaged to modify and preferably to increase the root association of the plant, by the method of the present invention wherein the genetic material as defined hereinabove has been introduced with such a biosymbiontic organism.

[0101] Without wishing to be bound by theory, experiments performed within the scope of the present invention indicated that Oryza longistaminata is particularly able to support root-associated microorganisms which are capable of biological nitrogen fixation due to which O. longistaminata shows a high ability to use nitrogen efficiently (NUE). The inventors have also found that it is possible to transfer genetic material from O. longistaminata to other species, preferably to O. sativa, to impart, enhance or otherwise modify the ability of such plant of other species to sustain root-associated nitrogen fixing microorganisms, and to use the nitrogen provided by such root-associated microorganisms. This finding is particularly surprising as it had become apparent that it is not possible to transfer nitrogen fixing microorganisms from leguminous plants to those of other species and maintain them in a stable association which provides biologically fixed nitrogen to the other species. Furthermore, it was surprisingly found that a stable association of nitrogen fixing microorganisms to plants could be established by merely transferring genetic material of O. longistaminata to the other species without requiring genetic modification of the nitrogen fixing microorganisms themselves.

[0102] According to the present invention, root association of a plant with nitrogen fixing microorganisms means that one or more species of nitrogen fixing microorganisms colonizes the interior of roots or root nodules or other tissue of the plant such that after inoculation of a plant with said microorganism(s) and growing of said plant for at least 1 month without further addition of said microorganism(s), viable cells of said microorganism(s) can still be detected in the plant tissue. Preferably, the nitrogen fixing microorganism(s) are endophytic.

[0103] Accordingly, in one embodiment the present invention concerns the method of the present invention as defined hereinabove, wherein the introduction of the isolated genetic material to the target plant or plant cell imparts, increases or modifies root association of the plant with at least one nitrogen fixing microorganism, and/or reduces nitrogen fertilization demand of the plant or the plant cell. In this respect, in one embodiment the nitrogen fixing microorganism(s) is/are diazotroph(s), preferably a (diazotrophic) bacterium, more preferably of family Rhodocyclaceae, still more preferred of genus Azoarcus, Azospira, Azovibrio or Azonexus and most preferably of genus Azoarcus. Preferably such a microorganism is further characterized by harboring genes for nitrogen fixation known in the art such as ninHDK, anfHDK, and/or vnfHDK.

[0104] O. longistaminata belongs to the group of Oryza sativa-like plants, and is traditionally identified by its AA genome type having 24 chromosomes (cf. Liakat Ali et al., Rice 2010 (3): 218-234). The species Oryza longistaminata and particularly the strain Xa21 had previously only gained attention due its resistance to bacterial blight and bacterial leaf streak and other pests and pathogens. It was the more surprising that this well analyzed species comprises a hitherto overlooked but important physiological property, i.e. sustaining a stable root-association with nitrogen fixing microorganisms, and that this property could be transferred to plants of other species. In particular, the inventors have found that O. longistaminata has a high proven input of biologically fixed nitrogen into plant biomass of (extrapolated) 80 kg N per ha per year even without inoculation with nitrogen fixing microorganisms. Furthermore, the inventors found that F1 generation of plants obtained by wide hybridization of O. sativa×O. longistaminata can gain similar amounts of fixed nitrogen as O. longistaminata, while O. sativa cultivars showed drastically lower nitrogen input as measured by ¹⁵N uptake.

[0105] Furthermore, in one embodiment the method of the present invention preferably comprises the step of crossbreeding a plant obtained according to any of the previous claims with a wild type plant of the target plant's species. This is preferably achieved by backcrossing of a plant of the F1 generation of O. longistaminata×the target species with a wild type of the target species. Preferably, even in F2 generations a stable association of nitrogen fixing microorganisms and plant roots of the F2 generation can be maintained. This is of particular advantage since F1 offspring of wide hybridization is sterile and may comprise traits of O. longistaminata which are not required for the desired transgenic plant or plant cell.

[0106] Furthermore, the inventors observed that it is difficult to quantify biological nitrogen fixation in plants. To screen the results of nitrogen transfer according to the present invention, preferably by wide hybridization, it is therefore advantageous to provide a method for rapid analysis of a biochemical trait correlating with nitrogen fixation.

[0107] In one embodiment thus, the present invention also relates to a method for quantification of nitrogenase gene expression in plant roots, comprising the steps of

[0108] (i) extracting mRNA of plant shoot roots comprising nitrogen fixing microorganisms,

[0109] (ii) quantification of nitrogenase mRNA by normalization

[0110] a) on plant ribosomal RNA levels, preferably of actin levels,

b) on in vitro amplified and quantified nitrogenase mRNA levels.

[0111] It is a particular advantage of the method of the present invention that it allows to quantify expression of nitrogenase in one day, whereas quantification by ¹⁵N uptake requires cultivation of plants for approximately two months. The analysis method of the present invention therefore allows a rapid characterization of offspring obtained by a transfer method of the present invention according to the expected nitrogen fixation and uptake rate of said offspring.

[0112] Furthermore, in one embodiment the present invention also relates to a cultivated plant, plant cell or seed thereof comprising the genetic material, the polynucleotide, the vector as defined hereinabove and/or obtainable by a method as described herein above, preferably exogenously expressing the genetic material.

[0113] The present invention also concerns a use of genetic material of Oryza longistaminata for imparting, increasing or modifying root association of a plant with a nitrogen fixing microorganism, reducing nitrogen fertilization demand of a plant, and/or improving nitrogen sustainability of cereals.

[0114] Acquisition of expression levels of nitrogenase mRNA is preferably performed by RT-PCR with nifH-specific primers and quantified using quantitative, real-time RT-PCR. RNA extraction and primer sets were described previously (T. Hurek, L. L. Handley, B. Reinhold-Hurek, Y. Piché, MPMI 15, 233 (2002), and Burbano, C. S., Y. Liu, K. L. Rösner, V. M. Reis, J. Caballero-Mellado, B. Reinhold-Hurek, T. Hurek. Environ. Microbiol. Rep. 3, 383 (2011) both documents are incorporated herein by reference for the purpose of describing determination of nifH transcript levels.

### DEFINITIONS AND EMBODIMENTS

[0115] It is to be noted that the term “a” or “an” entity refers to one or more of that entity; for example, “a plant cell,” is understood to represent one or more plant cells. As such, the terms “a” (or “an”), “one or more,” and “at least one” can be used interchangeably herein.

[0116] A cultivar and a cultivated plant, respectively, is a systematic group of cultivated plants that is clearly distinct, uniform, and stable in its characteristics and which, when propagated by appropriate means, retains these characteristics. A cultivar-group is a group of properly named cultivars, based on one or more criteria. A cultivated plant is a plant whose origin or selection is primarily due to the intentional activities of mankind Such a plant may arise either by deliberate or, in cultivation, accidental hybridization, or by selection from existing cultivated stock, or may be a selection from minor variants within a wild population and maintained as a recognizable entity solely by deliberate and continuous propagation; see, e.g., Trehane et al., Int. code of nomenclature of cultivated plants, Regnum Veg. 133 (1995), 1-175.

[0117] Thus, while Oryza longistaminata may be considered a wild type, non-cultivated plant rice Oryza sativa and elite rice varieties such japonica are considered cultivated plants. As mentioned before, the plant to be modified in accordance with the present invention is a cultivated plant.

### Polypeptides:

[0118] As used herein, the term “polypeptide” is intended to encompass a singular “polypeptide” as well as plural “polypeptides”, and refers to a molecule composed of monomers (amino acids) linearly linked by amide bonds (also known as peptide bonds). The term “polypeptide” refers to any chain or chains of two or more amino acids, and does not refer to a specific length of the product. Thus, “peptides,” “dipeptides,” “tripeptides, “oligopeptides,” “protein,” “amino acid chain,” or any other term used to refer to a chain or chains of two or more amino acids, are included within the definition of “polypeptide,” and the term “polypeptide” may be used instead of, or interchangeably with any of these terms.

[0119] The term “polypeptide” is also intended to refer to the products of post-expression modifications of the polypeptide, including without limitation glycosylation, acetylation, phosphorylation, amidation, derivatization by known protecting/blocking groups, proteolytic cleavage, or modification by non-naturally occurring amino acids. A polypeptide may be derived from a natural biological source or produced by recombinant technology, but is not necessarily translated from a designated nucleic acid sequence. It may be generated in any manner, including by chemical synthesis.

[0120] By an “isolated” polypeptide or a fragment, variant, or derivative thereof is intended a polypeptide that is not in its natural milieu. No particular level of purification is required. For example, an isolated polypeptide can be removed from its native or natural environment. Recombinantly produced polypeptides and proteins expressed in host cells are considered isolated for purposed of the invention, as are native or recombinant polypeptides which have been separated, fractionated, or partially or substantially purified by any suitable technique.

[0121] “Recombinant peptides, polypeptides or proteins” refer to peptides, polypeptides or proteins produced by recombinant DNA techniques, i.e. produced from cells, microbial or plant cells, transformed by an exogenous recombinant DNA expression construct encoding the fusion protein including the desired peptide. Proteins or peptides expressed in most bacterial cultures will typically be free of glycan. Proteins or polypeptides expressed in yeast may have a glycosylation pattern different from that expressed in mammalian cells.

[0122] Also included as polypeptides of the present invention are fragments, derivatives, analogs and variants of the foregoing polypeptides and any combination thereof. The terms “fragment,” “variant,” “derivative” and “analog” include peptides and polypeptides having an amino acid sequence sufficiently similar to the amino acid sequence of the natural peptide. The term “sufficiently similar” means a first amino acid sequence that contains a sufficient or minimum number of identical or equivalent amino acid residues relative to a second amino acid sequence such that the first and second amino acid sequences have a common structural domain and/or common functional activity. For example, amino acid sequences that comprise a common structural domain that is at least about 60%, at least about 65%, at least about 70%, at least about 75%, at least about 80%, at least about 85%, at least about 90%, at least about 91%, at least about 92%, at least about 93%, at least about 94%, at least about 95%, at least about 96%, at least about 97%, at least about 98%, at least about 99%, or at least about 100%, identical are defined herein as sufficiently similar. Preferably, variants will be sufficiently similar to the amino acid sequence of the preferred polypeptides of the present invention. Such variants generally retain the functional activity of the polypeptides of the present invention. Variants include peptides that differ in amino acid sequence from the native and wt polypeptide, respectively, by way of one or more amino acid deletion(s), addition(s), and/or substitution(s). These may be naturally occurring variants as well as artificially designed ones.

Determination of Similarity and/or Identity of Molecules

[0123] “Similarity” between two polypeptides is determined by comparing the amino acid sequence of one polypeptide to the sequence of a second polypeptide. An amino acid of one polypeptide is similar to the corresponding amino acid of a second polypeptide if it is identical or a conservative amino acid substitution. Conservative substitutions include those described in Dayhoff, M. O., ed., The Atlas of Protein Sequence and Structure 5, National Biomedical Research Foundation, Washington, D.C. (1978), and in Argos, EMBO J. 8 (1989), 779-785. For example, amino acids belonging to one of the following groups represent conservative changes or substitutions: -Ala, Pro, Gly, Gln, Asn, Ser, Thr; -Cys, Ser, Tyr, Thr; -Val, Ile, Leu, Met, Ala, Phe; -Lys, Arg, His; -Phe, Tyr, Trp, His; and -Asp, Glu. For nucleic acids, such as RNA and DNA, similarity or identity between two molecules is mostly determined just by distinguishing between matches, where the two residues are the same, and mismatches between both sequences.

[0124] The determination of percent identity or similarity between two sequences is preferably accomplished using the mathematical algorithm of Karlin and Altschul (1993) Proc. Natl. Acad. Sci USA 90: 5873-5877. Such an algorithm is incorporated into the BLASTn and BLASTp programs of Altschul et al. (1990) J. Mol. Biol. 215: 403-410 available at NCBI (http://www.ncbi.nlm.nih.gov/blast/Blast.cge).

[0125] The determination of percent identity or similarity is performed with the standard parameters of the BLASTn and BLASTp programs.

[0126] BLAST polynucleotide searches are performed with the BLASTn program. For the general parameters, the “Max Target Sequences” box may be set to 100, the “Short queries” box may be ticked, the “Expect threshold” box may be set to 10 and the “Word Size” box may be set to 28. For the scoring parameters the “Match/mismatch Scores” may be set to 1, −2 and the “Gap Costs” box may be set to linear. For the Filters and Masking parameters, the “Low complexity regions” box may not be ticked, the “Species-specific repeats” box may not be ticked, the “Mask for lookup table only” box may be ticked, and the “Mask lower case letters” box may not be ticked.

[0127] BLAST protein searches are performed with the BLASTp program. For the general parameters, the “Max Target Sequences” box may be set to 100, the “Short queries” box may be ticked, the “Expect threshold” box may be set to 10 and the “Word Size” box may be set to “3”. For the scoring parameters the “Matrix” box may be set to “BLOSUM62”, the “Gap Costs” Box may be set to “Existence: 11 Extension: 1”, the “Compositional adjustments” box may be set to “Conditional compositional score matrix adjustment”. For the Filters and Masking parameters the “Low complexity regions” box may not be ticked, the “Mask for lookup table only” box may not be ticked and the “Mask lower case letters” box may not be ticked.

### Polynucleotides:

[0128] The term “polynucleotide” is intended to encompass a singular nucleic acid as well as plural nucleic acids, and refers to an isolated nucleic acid molecule or construct, e.g., messenger RNA (mRNA) or plasmid DNA (pDNA). A polynucleotide may comprise a conventional phosphodiester bond or a non-conventional bond (e.g., an amide bond, such as found in peptide nucleic acids (PNA)). The term “nucleic acid” refers to any one or more nucleic acid segments, e.g., DNA or RNA fragments, present in a polynucleotide. By “isolated” nucleic acid or polynucleotide is intended a nucleic acid molecule, DNA or RNA, which has been removed from its native environment. For example, a recombinant polynucleotide encoding an polypeptide contained in a vector is considered isolated for the purposes of the present invention. Further examples of an isolated polynucleotide include recombinant polynucleotides maintained in heterologous host cells or purified (partially or substantially) polynucleotides in solution. Isolated RNA molecules include in vivo or in vitro RNA transcripts of polynucleotides of the present invention. Isolated polynucleotides or nucleic acids according to the present invention further include such molecules produced synthetically. In addition, polynucleotide or a nucleic acid may be or may include a regulatory element such as a promoter, ribosome binding site, or a transcription terminator.

[0129] As used herein, a “coding region” is a portion of nucleic acid which consists of codons translated into amino acids. Although a “stop codon” (TAG, TGA, or TAA) is not translated into an amino acid, it may be considered to be part of a coding region, but any flanking sequences, for example promoters, ribosome binding sites, transcriptional terminators, introns, and the like, are not part of a coding region. Two or more coding regions of the present invention can be present in a single polynucleotide construct, e.g., on a single vector, or in separate polynucleotide constructs, e.g., on separate (different) vectors. Furthermore, any vector may contain a single coding region, or may comprise two or more coding regions, e.g., a single vector may separately encode an immunoglobulin heavy chain variable region and an immunoglobulin light chain variable region. In addition, a vector, polynucleotide, or nucleic acid of the invention may encode heterologous coding regions, either fused or not fused to a nucleic acid encoding, e.g., a gene from the isolated genetic material as defined hereinabove, or a fragment, variant, or derivative thereof. Heterologous coding regions include without limitation specialized elements or motifs, such as a secretory signal peptide or a heterologous functional domain.

[0130] In certain embodiments, the polynucleotide or nucleic acid is DNA. In the case of DNA, a polynucleotide comprising a nucleic acid which encodes a polypeptide normally may include a promoter and/or other transcription or translation control elements operably associated with one or more coding regions. An operable association is when a coding region for a gene product, e.g., a polypeptide, is associated with one or more regulatory sequences in such a way as to place expression of the gene product under the influence or control of the regulatory sequence(s). Two DNA fragments (such as a polypeptide coding region and a promoter associated therewith) are “operably associated” or “operably linked” if induction of promoter function results in the transcription of mRNA encoding the desired gene product and if the nature of the linkage between the two DNA fragments does not interfere with the ability of the expression regulatory sequences to direct the expression of the gene product or interfere with the ability of the DNA template to be transcribed. Thus, a promoter region would be operably associated with a nucleic acid encoding a polypeptide if the promoter was capable of effecting transcription of that nucleic acid. The promoter may be a cell-specific promoter that directs substantial transcription of the DNA only in predetermined cells. Other transcription control elements, besides a promoter, for example enhancers, operators, repressors, and transcription termination signals, can be operably associated with the polynucleotide to direct cell-specific transcription. Suitable promoters and other transcription control regions are disclosed herein.

### Hybridization Processes

[0131] The hybridization and amphiploidization processes are facilitated when the selected species are dioecious or self-incompatible, have a short juvenile phase, and are amenable to efficient procedures for cytogenetic and embryological analyses of root tips and ovules, respectively. The use of male sterile lines or emasculation procedures are required if the plants are not dioecious or self-incompatible. Hybrids are produced between sexual varieties or lines that display appropriate degrees of divergence in photoperiod responses and female developmental schedules.

[0132] Intraspecific hybrids are made using standard techniques as taught plant breeding texts, e.g. Poehlman, Breeding Field Crops (1987). The successful production of interspecific or intergeneric hybrids may require hormone treatments to the florets and embryo rescue procedures as taught in recent references involving wide hybridization, e.g. Z. W. Liu et al., Hybrids and Backcross Progenies between Wheat (Triticum aestivum L.) and Apomict Australian Wheatgrass [Elymus rectisetus (Nees in Lehm.) A. Love & Connor]: Karyotypic and Genomic Analyses, 89 Theor. Appl. Genet. 599-605 (1994) (incorporated herein by reference). Hybrids are verified by their intermediate phenotype

### Amphiploidization Processes

[0133] The chromosome numbers of hybrids are doubled using standard colchicine techniques, e.g. J. Torabinejad et al., Morphology and Genome Analyses of Interspecific Hybrids of Elymus scabrus, Genome 29 (1987), 150-155 (incorporated herein by reference). Alternatively, recently developed tissue culture techniques may be used, as described, e.g., in Leblanc et al., Chromosome Doubling in Tripsacum: the Production of Artificial, Sexual Tetraploid Plants, Plant Breed. 114 (1995), 226-30 (incorporated herein by reference); Salon & Earle, Determination of Mode of Reproduction of Synthetic Tetraploids of Eastern Gamagrass, Agron. Abs. Pg 114 (1994) (incorporated herein by reference); Cohen & Yao, In Vitro Chromosome Doubling of Nine Zantedeschia Cultivars, Plant Cell, Tiss. Org. Cult. 47 (1996), 43-49 (incorporated herein by reference); and Chalak & Legave, Oryzalin Combined with Adventitious Regeneration for an Efficient Chromosome Doubling of Trihaploid Kiwifruit, Plant Cell Rep. 16 (1996), 97-100 (incorporated herein by reference). Partially amphiploid 2n+n Bnr hybrids are often produced in low frequencies (0.5% to 3%) when interspecific F1s are backcrossed, e.g. Z. W. Liu et al., Theor. Appl. Genet. 89 (1994), 599-605, and this frequency may be much higher if tendencies for apomixes (unreduced egg formation) exist in the hybrids as taught in O. Leblanc et al., Reproductive Behavior in Maize Tripsacum Polyhaploid Plants: Implications for the Transfer of Apomixis into Maize, J. Hered. 87 (1996), 108-111 (incorporated herein by reference). Thus, a preferred method for doubling chromosomes of intraspecific and interspecific hybrids is to use one or more of the colchicine (or other known spindle inhibitor chemical) treatment methods listed above. Likewise, a preferred method for doubling chromosomes of interspecific hybrids involves backcrossing to one of the sexual parents and counting chromosomes in root tips to determine partial amphiploidy (usually triploidy).

[0134] This is followed by backcrossing to the other parent to obtain a full amphiploid, or to the same parent to obtain a partial amphiploid (three genomes from one parent and one genome from the other). Amphiploidization may precede or follow hybridization.

[0135] As used herein the phrase “plant yield” refers to the amount (e.g., as determined by weight or size) or quantity (numbers) of tissues or organs produced per plant or per grow season. Hence increased yield could affect the economic benefit one can obtain from the plant in a certain growing area and/or growing time.

[0136] It should be noted that a plant yield can be affected by various parameters including, but not limited to, plant biomass; plant vigor; growth rate; seed yield; seed or grain quantity; seed or grain quality; oil yield; content of oil, starch and/or protein in harvested organs (e.g., seeds or vegetative parts of the plant); number of flowers (florets) per panicle (expressed as a ratio of number of filled seeds over number of primary panicles); harvest index; number of plants grown per area; number and size of harvested organs per plant and per area; number of plants per growing area (density); number of harvested organs in field; total leaf area; carbon assimilation and carbon partitioning (the distribution/allocation of carbon within the plant); resistance to shade; number of harvestable organs (e.g. seeds), seeds per pod, weight per seed; and modified architecture [such as increase stalk diameter, thickness or improvement of physical properties (e.g. elasticity)]. As indicated above, in one embodiment the method of the present invention leads to an increase of at least one of the group of parameters selected from the above list, comprising yield, biomass, growth rate, vigor, nitrogen use efficiency and/or abiotic stress tolerance, preferably tolerance to nutrient deficiency of a plant.

[0137] As used herein the phrase “seed yield” refers to the number or weight of the seeds per plant, seeds per pod, or per growing area or to the weight of a single seed, or to the oil extracted per seed. Hence seed yield can be affected by seed dimensions (e.g., length, width, perimeter, area and/or volume), number of (filled) seeds and seed filling rate and by seed oil content. Hence increase seed yield per plant could affect the economic benefit one can obtain from the plant m a certain growing area and/or growing time; and increase seed yield per growing area could be achieved by increasing seed yield per plant, and/or by increasing number of plants grown on the same given area. Additionally or alternatively to the above indicated thus, in one embodiment the method of the present invention leads to an increase of at least one of the group of parameters concerning seed or grain selected from the above list comprising yield and/or quality of a plant's seed or grain, preferably number or weight of the seeds/grains per plant, seeds/grains per pod, or per growing area or the weight of a single seed/grain, or amount and/or quality of the oil extracted per seed/grain.

[0138] The term “seed” (also referred to as “grain” or “kernel”) as used herein refers to small embryonic plant enclosed in a covering called the seed coat (usually with some stored food), the product of the ripened ovule of gymnosperm and angiosperm plants which occurs after fertilization and some growth within the mother plant.

[0139] As used herein the phrase “plant biomass” refers to the amount (e.g., measured in grams of air-dry tissue) of a tissue produced from the plant in a growing season, which could also determine or affect the plant yield or the yield per growing area. An increase in plant biomass can be in the whole plant or in parts thereof such as aboveground (harvestable) parts, vegetative biomass, roots and seeds.

[0140] As used herein the phrase “growth rate” refers to the increase m plant organ/tissue size per time (can be measured in cm² per day).

[0141] As used herein the phrase “plant vigor” refers to the amount (measured by weight) of tissue produced by the plant in a given time. Hence increased vigor could determine or affect the plant yield or the yield per growing time or growing area. In addition, early vigor (seed and/or seedling) results in improved field stand.

[0142] Improving early vigor is an important objective of modern breeding programs in both temperate and tropical rice cultivars. Long roots are important for proper soil anchorage in water-seeded rice. Where rice is sown directly into flooded fields, and where plants must emerge rapidly through water, longer shoots are associated with vigor. Where drill-seeding is practiced, longer mesocotyls and coleoptiles are important for good seedling emergence. The ability to engineer early vigor into plants would be of great importance in agriculture. For example, poor early vigor has been a limitation to the introduction of maize (Zea mays L.) hybrids based on Com Belt germplasm in the European Atlantic.

[0143] As used herein, the phrase “non-stress conditions” refers to the growth conditions (e.g., water, temperature, light-dark cycles, humidity, salt concentration, fertilizer concentration in soil, nutrient supply such as nitrogen, phosphorous and/or potassium), that do not significantly go beyond the everyday climatic and other abiotic conditions that plants may encounter, and which allow optimal growth, metabolism, reproduction and/or viability of a plant at any stage in its life cycle (e.g., in a crop plant from seed to a mature plant and back to seed again). The person skilled in the art is aware of normal soil conditions and climatic conditions for a given plant in a given geographic location. It should be noted that while the non-stress conditions may include some mild variations from the optimal conditions (which vary from one type/species of a plant to another), such variations do not cause the plant to cease growing without the capacity to resume growth.

[0144] The phrase “abiotic stress” as used herein refers to any adverse effect on metabolism, growth, reproduction and/or viability of a plant. Accordingly, abiotic stress can be induced by suboptimal environmental growth conditions such as, for example, salinity, water deprivation, flooding, freezing, low or high temperature, heavy metal toxicity, anaerobiosis, nutrient deficiency, atmospheric pollution or UV irradiation.

[0145] The phrase “abiotic stress tolerance” as used herein refers to the ability of a plant to endure an abiotic stress without suffering a substantial alteration in metabolism, growth, productivity and/or viability.

[0146] As used herein the phrase “fertilizer use efficiency” refers to the metabolic process(es) which lead to an increase in the plant's yield, biomass, vigor, and growth rate per fertilizer unit applied. The metabolic process can be the uptake, spread, absorbent, accumulation, relocation (within the plant) and use of one or more of the minerals and organic moieties absorbed by the plant, such as nitrogen, phosphates and/or potassium, preferably referring to nitrogen however.

[0147] As used herein the phrase “nitrogen use efficiency (NUE)” refers to the metabolic process(es) which lead to an increase in the plant's yield, biomass, vigor, abiotic stress tolerance, growth rate per nitrogen unit applied, nitrogen gain derived from biological nitrogen fixation and/or preferably to tolerance to nutrient deficiency of a plant. The metabolic process can be uptake/increased nitrogen gain derived from biological nitrogen fixation, spread, absorbent, accumulation, relocation (within the plant) and/or use of nitrogen absorbed by the plant.

[0148] As used herein the phrase “nitrogen-limiting conditions” refers to growth conditions which include a level (e.g., concentration) of nitrogen (e.g., ammonium or nitrate) applied which is below the level needed for normal plant metabolism, growth, reproduction and/or viability.

[0149] Improved plant NUE is translated in the field into either harvesting similar quantities of yield, while implementing less fertilizers, or increased yields gained by implementing the same levels of fertilizers. Thus, improved NUE has a direct effect on plant yield in the field. Thus, the polynucleotides and polypeptides of some embodiments of the invention positively affect plant yield, seed yield, and/or plant biomass. In addition, the benefit of improved plant NUE will certainly improve crop quality and biochemical constituents of the seed such as protein yield and oil yield.

[0150] It should be noted that improved abiotic stress tolerance will confer plants with improved vigor also under non-stress conditions, resulting in crops having improved biomass and/or yield e.g., elongated fibers for the cotton industry, higher oil content.

[0151] The term “isolated” refers to an entity such as a polynucleotide, polypeptide, gene etc. at least partially separated from the natural environment e.g., from a plant cell.

[0152] These and other embodiments are disclosed and encompassed by the description and examples of the present invention. Further literature concerning any one of the materials, methods, uses and compounds to be employed in accordance with the present invention may be retrieved from public libraries and databases, using for example electronic devices. For example the public database “Medline” may be utilized, which is hosted by the National Center for Biotechnology Information and/or the National Library of Medicine at the National Institutes of Health. Further databases and web addresses, such as those of the European Bioinformatics Institute (EBI), which is part of the European Molecular Biology Laboratory (EMBL) are known to the person skilled in the art and can also be obtained using internet search engines. An overview of patent information in biotechnology and a survey of relevant sources of patent information useful for retrospective searching and for current awareness is given in Berks, TIBTECH 12 (1994), 352-364.

[0153] The above disclosure generally describes the present invention. Unless otherwise stated, a term as used herein is given the definition as provided in the Oxford Dictionary of Biochemistry and Molecular Biology, Oxford University Press, 1997, revised 2000 and reprinted 2003, ISBN 0 19 850673 2. Several documents are cited throughout the text of this specification. Full bibliographic citations may be found at the end of the specification immediately preceding the claims. The contents of all cited references (including literature references, issued patents, published patent applications as cited throughout this application and manufacturer's specifications, instructions, etc.) are hereby expressly incorporated by reference; however, there is no admission that any document cited is indeed prior art as to the present invention.

[0154] A more complete understanding can be obtained by reference to the following specific examples which are provided herein for purposes of illustration only and are not intended to limit the scope of the invention.

### EXAMPLES

[0155] The Examples and Figures which follow further illustrate the invention, but should not be construed to limit the scope of the invention in any way.

[0156] The practice of the present invention will employ, unless otherwise indicated, conventional techniques of cell biology, cell culture, molecular biology, transgenic biology, microbiology, and recombinant DNA, which are within the skill of the art.

[0157] Methods in molecular genetics and genetic engineering are described generally in the current editions of Molecular Cloning: A Laboratory Manual, (Sambrook et al., (1989) Molecular Cloning: A Laboratory Manual, 2nd ed., Cold Spring Harbor Laboratory Press); DNA Cloning, Volumes I and II (Glover ed., 1985); Oligonucleotide Synthesis (Gait ed., 1984); Nucleic Acid Hybridization (Hames and Higgins eds. 1984); Transcription And Translation (Hames and Higgins eds. 1984).

[0158] Detailed methods how to assess yield, biomass, growth rate, vigor, nitrogen use efficiency and abiotic stress tolerance and in particular tolerance to nutrient, i.e. nitrogen deficiency of a plant, in particular cereals; methods of producing genetically engineered plants including appropriate vectors and transformation protocols; determining expression levels of nitrogenase mRNA in plant shoot roots and association root association of the plant with a nitrogen fixing microorganism, and/or reduction of nitrogen fertilization demand of a plant are known to the person skilled in the art and are described in, e.g., international applications WO2010/049897 and WO2013/066805, the disclosure content of which is incorporated herein by reference.

### Example 1

### Gene Mining

[0159] The following description summarizes the process how putative plant candidate genes involved in high nitrogen fixation potential in O. longistaminata have been defined.

[0160] Abbreviations: BNF—biological nitrogen fixation; ESTs—expressed sequence tags; nifH—one of the structural genes encoding nitrogenase, the bacterial key enzyme for nitrogen fixation

### First RNA Analyses:

[0161] As no genome sequence of Orya longistaminata is currently available for gene mining, deep sequencing of the root transcriptome of O. longistaminata was carried out on plants adapted to high BNF rates in soil without N-fertilizer. In total, early next-generation sequencing (pyrosequencing) revealed 60,155 ESTs which could be aligned to japonica or indica rice genome sequences, out of which remarkably 9.993 were genes that had not yet been detected to be expressed in Oryza yet. Approx. 11,000 ESTs were potential novel sequence tags found only in our O. longistaminata transcript collection.

[0162] However, they might partially also originate from other organisms as the soil system was not sterile. These sequence data were a valuable resource for the identification of genes involved in supporting high nitrogen fixation rates and for development of an O. longistaminata microarray for transcriptome analysis and gene mining, the data have been published (Yang et al., BMC Genomics. 11 (2010), 705).

### Narrowing Down the Number of Candidate Genes

[0163] Studies on Differential Gene Expression Related to High BNF Capacity in O. longistaminata.

[0164] Previous experiments have shown that the population of diazotrophs in O. longistaminata roots is drastically changed shortly after application of nitrogen fertilizer, and also expression of bacterial nitrogenase genes (nifH) ceases rapidly. Therefore, genes were identified herein of O. longistaminata that are differentially expressed under external N-depleted conditions of high nitrogen fixation rates in comparison to N-fertilized conditions lacking BNF.

[0165] Pot experiments were carried out with a single dose of nitrogen fertilizer as ammonium nitrate (corresponding to 100 kg N/ha), and plants were adapted to these conditions for several weeks. Expression of bacterial nifH genes was below the detection level in these fertilized plants. From roots of these plants and plants supported by nitrogen fixation, RNAs were extracted, and an SSH—(Suppression subtractive hybridization) was constructed using the PCR-Select cDNA Subtraction Kit (Clontech). From 1358 clones sequenced by Sanger sequencing, 412 different ESTs were detected that were putatively up-regulated under conditions of BNF. This approach provided novel sequence resources and putative candidate genes for support of high nitrogen fixation potential, and for microarray development.

### Studies on Differential Gene Expression by Microarray Analysis:

[0166] In a similar biological set-up as above, O. longistaminata plants were set up in soil that were adapted to BNF or to nitrogen fertilization, respectively. RNAs from these roots were used to compare the expression profile. For transcriptome microarrays, a microarray designed for O. sativa transcriptome analysis (Agilent) has been upgraded with additional genes detected in the SSH approach. Application of this chip showed that 55 of the latter genes were found to be upregulated during BNF as expected.

[0167] As a second array, probes have been developed for the ESTs detected in the O. longistaminata roots. In this 40K-Array (Agilent), approx. 770 genes/ESTs were differentially regulated under BNF conditions versus N-fertilized conditions. Out of those, 375 ESTs were up-regulated with a factor of at least 2-fold. They were considered as promising candidate genes.

### Genome Analysis:

[0168] However, ESTs from Next Generation Sequencing (NGS) were relatively short, which makes microarray construction and annotation of complete genes difficult, as well as bioinformatic analysis. Particularly, many of the ESTs may comprise different regions of the same target gene. To obtain a larger amount of full-length sequences, which are especially important for novel or low-identity ESTs, a draft genome sequence has been generated from the here described O. longistaminata accession. Custom sequencing was done by next-generation sequencing. First a non-saturating low-cost approach has been chosen including the combination of two plates of 454-pyrosequencing (one containing 8 kb libraries), and one channel of paired-end Illumina HighSeq sequencing. Mapping of the ESTs from NGS to the draft genome thus allowed to reduce the list of candidate genes again to the genes indicated in Table 1, below.

TABLE 1
Genes identified within the experiments of the present invention as involved
in high nitrogen fixation potential in O. longistaminata. Indicated are the
predicted coding sequences (CDS) and predicted amino acid/protein
sequences. Annot. = Annotation of homologues/similar Genes in O. sativa.
Sequences 4, 61 and 66, marked with a star (*) in the Gene no. column were
stronger expressed in the F1 hybrids than in the O. sativa. parent plant.

| Gene | | | Predicted protein |
|---|---|---|---|
| no. | Annot. | Predicted CDS | (amino acid) sequence |
| 1 | Xa21_Os04g0450100 | ATGGGGAGCCTTGGCGGAGAGGAGGGGGCGAGGCCGGCGGAGGGGGCGCGGAGGCCGAGGTTCCTGTG | MGSLGGEEGARPAEGARRPRFLC |
| | | CCTGCACGGGTTCCGGACGAGCGGGGAGATCATGCGGAAGCAGGTGGTGGGGAAGTGGCCCGCCGACG | LHGFRTSGEIMRKQVVGKWPADV |
| | | TCACGGCGCGCCTCGACCTCGTCTTCGCCGACGCGCCGTTCCCCGCCGAGGGGAAGTCCGACGTCGAG | TARLDLVFADAPFPAEGKSDVEG |
| | | GGCATCTTCGACCCGCCCTACTACGAGTGGTTCCAGTTCGACAAGAATTTTACAGAGTACAGGAATTT | IFDPPYYEWFQFDKNFTEYRNFD |
| | | CGACGAATGCCTGAACTACATCGAGGAATTGATGATTAAAGAAGGGCCTTTTGATGGACTGATGGGTT | ECLNYIEELMIKEGPFDGLMGFS |
| | | TCTCTCAGGGCTCGATTCTATCTGGCGCCCTTCCGGGCCTCCAAGAACAAGGGTTGGCCCTGACTAGA | QGSILSGALPGLQEQGLALTRVP |
| | | GTTCCTAAGATCAAGTACCTCATAATCATAGGAGGCGCCAAGTTTCAGTCGCCGACGGTTGCCGAGAA | KIKYLIIIGGAKFQSPTVAEKAY |
| | | GGCGTACGCCAATAACATCAAATGCCCCTCGGTTCACTTCCTCGGTGACACTGACTTTCTGAAAACCC | ANNIKCPSVHFLGDTDFLKTHGE |
| | | ATGGCGAAAAGCTTATAGAATCATATGTGGATCCATTCATCATTCGTCATCCAAAGGGCCACACTGTT | KLIESYVDPFIIRHPKGHTVPRL |
| | | CCAAGGCTTGATGAGAAGAGTCTGGAAATCATGCTCCATTTCCTCGACAAGATTGAGAAGGAGACGGC | DEKSLEIMLHFLDKIEKETALEH |
| | | GCTCGAGCATTCATCCACTGATGTTGACGAAAAGGAAATGTGCTTGTGA | SSTDVDEKEMCL* |
| | | SEQ ID NO: 1 | SEQ ID NO: 2 |
| 2 | Xa21_Os03g0678800 | ATGGACGACATGGCCAAGCTAGCTCAGATGCCGCGCGCTCCTCTGCTCGTCGTCCTGATGCTGATGCT | MDDMAKLAQMPRAPLLVVLMLML |
| | | GCTGGGTGTCGGCGCGGCGGCCGTGCCGGAGTACAGGGAGGCGCCGCACTTCACCAACTCGGCGGCAG | LGVGAAAVPEYREAPHFTNSAAA |
| | | CGCGGTGCCCGCCGCCGCTGCCGGCGACGGACGCGGACGCGGCGTGCTCGCCGCACGCGGCGGTGCAC | RCPPPLPATDADAACSPHAAVHV |
| | | GTGGCCATGACGCTGGACGCGCCGTACCTGAGGGGGACCATGGCCGCGGTGCTCTCCGTCCTCCGCCA | AMTLDAPYLRGTMAAVLSVLRHA |
| | | CGCCTCCTGCCCGGAGTCCGTCCACTTCCACTTCCTCGCCTCCTCCTCCTCGTCGCCGGAGGCGGCGG | SCPESVHFHFLASSSSSPEAAAA |
| | | CGGCGGCGCGGGAGCTGAGGGACACCGTGCGGGCGTCGTTCCCGTCGCTGGCGTTCCGGGTGTACCCG | ARELRDTVRASFPSLAFRVYPFD |
| | | TTCGACGAGTCCCGCGTCGCGGGGCTCATCTCCACCTCCATCCGCGGCGCGCTCGACCGCCCGCTCAA | ESRVAGLISTSIRGALDRPLNYA |
| | | CTACGCCCGCTCCTACCTCGCCACCACGCTCCCCGCCTGCGTCCGCCGCGTCGTCTACCTCGACTCCG | RSYLATTLPACVRRVVYLDSDVV |
| | | ACGTCGTGGTCACCGACGACATCGCCGCGCTCGCCGCGACGCCGCTGCCCGGGGAGACCGCCGTGGCG | VTDDIAALAATPLPGETAVAAPE |
| | | GCGCCCGAGTACTGCGGCGCCAACTTCACCGCCTACTTCACGCCGGGGTTCTGGGCGTCGCGGGCGCT | YCGANFTAYFTPGFWASRALSES |
| | | GTCGGAGTCCGCGTTCGCGGGGCGGCGCGCGTGCTACTTCAACACGGGGGTGATGGTGCTGGACCTGC | AFAGRRACYFNTGVMVLDLPRWR |
| | | CCCGGTGGCGGCGCGCGGGGTACACGGCGCAGATCGAGGAGTGGATGGAGCTGCAGAGGCGGGTGCGC | RAGYTAQIEEWMELQRRVRIYEL |
| | | ATCTACGAGCTGGGCTCGCTGCCGCCGTTCCTCCTCGTGTTCGCCGGCCGCATCGCCGCCGTCGACCA | GSLPPFLLVFAGRIAAVDHRWNQ |
| | | CCGCTGGAACCAGCACGGCCTCGGCGGCGACAACTACCGGGGGCTCTGCCGCGGCCTGCACGCCGGCG | HGLGGDNYRGLCRGLHAGAVSLL |
| | | CCGTCAGCCTCCTGCACTGGAGCGGCAAGGGGAAGCCATGGGACAGGCTCGACGCCGGCAAGCCGTGC | HWSGKGKPWDRLDAGKPCPLDAV |
| | | CCGCTCGACGCCGTCTGGGCCAAGTACGACCTGCTCCGCCCGGCGGCGGCGATCGAGACCTCGTGA | WAKYDLLRPAAAIETS* |
| | | SEQ ID NO: 3 | SEQ ID NO: 4 |
| 3 | Xa21_OsJ_21238 | ATGTCGTCTGCTGCCATTGCCATTAGCCCGATGGTGGAAGAGTTTGCTCTCCTGCCCATCTGCTTCGA | MSSAAIAISPMVEEFALLPICFD |
| | | CGGCAGCCGGTCGCCCCACTGTTTGTCCGGGTCACAGCTGCAGGATTCGATTATCATCTTTCTTGCTG | GSRSPHCLSGSQLQDSIIIFLAV |
| | | TGCCTGGTGCCCCACCGATGCCGATGAGTGTGCTCGGCTCGGAGTCCATCGCCTCGGTCAAGCTGCGC | PGAPPMPMSVLGSESIASVKLRI |
| | | ATTCAGCGGTTCAAGGGGTTCGTGGTTAACAAGCAGAGGCTTGTGCTTGATGGGCACGAGCTGGCAAG | QRFKGFVVNKQRLVLDGHELARN |
| | | GAACAACTGCCATGTGAAGGATTACGGGCTTGCCGATGGAAATGTTCTGCACCTTGTTATCCGCTTGG | NCHVKDYGLADGNVLHLVIRLAD |
| | | CTGATCTTCGCTTGATTAACATCGAGACTACCAGTGGAAAGAAGTTTCAGTTCCAGGTGGACCAGAGC | LRLINIETTSGKKFQFQVDQSRN |
| | | CGCAATGTCAAGTATCTCAAGAGTAAGCTGGCAGTGGAGGGAGATGAGGACCTTGGTGAGGATCACAA | VKYLKSKLAVEGDEDLGEDHKLE |
| | | GCTTGAATGTGATGGCAAGGAGCTTGAGGACCACCAGCTGATTGCTGATATTAGCAAGAAGGATGATG | CDGKELEDHQLIADISKKDDAVI |
| | | CTGTGATCCATTTGTTCATCCGCAAGCCAGCAAAGTTACGGACACAGCAAGTTGATAAAGACACGGTG | HLFIRKPAKLRTQQVDKDTVVTV |
| | | GTTACAGTTGTCACTCCGCAGGAGAAAGAGAACCTTCAAAATGAAGCTCATGCTGTGAACCCTGCTAA | VTPQEKENLQNEAHAVNPAKPAG |
| | | ACCAGCTGGTGCTAGGCCTGCTCTTGTTGAACCAATTATCGTTAACCACAAGGTGAAGCTATCACTTG | ARPALVEPIIVNHKVKLSLEVMR |
| | | AAGTGATGAGAATGATTAGCTCAGCCATAGCTGGTCTTGAGAATGGATACTTGCCAGTGATGTCAGCT | MISSAIAGLENGYLPVMSAEGSG |
| | | GAAGGTTCAGGGGGTGTTTACTTCATGCAAGATGCATCAGGAGAGAAGAATATTGCAGTGTTTAAGCC | GVYFMQDASGEKNIAVFKPRDEE |
| | | CAGAGATGAGGAACCTATGGCTAAAAACAACCCAAGAGGGCTTCCAGTGTCGACTGATGGAGAAGGCA | PMAKNNPRGLPVSTDGEGMKRGT |
| | | TGAAGAGGGGGACACTTGTAGGGGAAGGTGCATTTAGGGAAGTTGCTGCTTATATTCTTGACCATCCA | LVGEGAFREVAAYILDHPIGDHE |
| | | ATTGGTGATCATGAATCTGAAGAACGTATCGGGTTCTCTGGTGTGCCTCCCACAGCATTGGTCCGGAG | SEERIGFSGVPPTALVRSLHRGK |
| | | CTTACACAGGGGGAAGAGCTTCAAGATTGGATCACTGCAGATGTTCATTCAGAACAATGGAAGTTGTG | SFKIGSLQMFIQNNGSCEDMGPR |
| | | AGGATATGGGTCCCCGAGCATTTCCAGTGAAGGAGGTCCACAAAATAGCAGTGTTAGATCTTAGGTTA | AFPVKEVHKIAVLDLRLANADRH |
| | | GCAAACGCTGATCGTCATGCAGGGAACATTTTAGTGTGCAAGGATGAAGAAGGTGGCAATTACAAGTT | AGNILVCKDEEGGNYKLVPIDHG |
| | | GGTTCCAATTGATCATGGTTACTGCTTGCCAGAGAAGTTTGAAGATTGTACCTTTGAGTGGCTGTACT | YCLPEKFEDCTFEWLYWPQAREP |
| | | GGCCCCAGGCTCGTGAACCATTCAGTGATGAAACCATTGCATACATCAAATCACTAGACGCTGAAGAG | FSDETIAYIKSLDAEEDIKLLKF |
| | | GACATCAAGCTTCTCAAGTTCCATGGGTGGGAGCTGTCTGCAAGATGTGCTCGTGTCCTGCGCATCAG | HGWELSARCARVLRISTMLLKKG |
| | | CACCATGCTTTTAAAGAAAGGTGCAGCACGAGGCCTCACACCGTATGACATCGGGCGTATACTGTGCA | AARGLTPYDIGRILCRETVNRDS |
| | | GGGAAACTGTGAATAGAGACTCTGAGATTGAGGACATCGTCCAGGAAGCCGAGGACCATGTTCTCCCA | EIEDIVQEAEDHVLPGSSEVIFL |
| | | GGGTCAAGTGAAGTAATCTTCTTAGAAACCGTATCTGAAATCATAGACCGTCACCTCGACAAGAAGTT | ETVSEIIDRHLDKKFA* |
| | | CGCTTAG SEQ ID NO: 5 | SEQ ID NO: 6 |
| 4* | Xa21_Os03g0764100 | ATGTCGAGCGCGTCGTCCATGGAAGCGCTCCACGCCGCGGTGCTCAAGGAGGAGCAGCAGCAGCACGA | MSSASSMEALHAAVLKEEQQQHE |
| | | GGTGGAGGAGGCGACGGTCGTGACGAGCAGCAGCGCCACGAGCGGGGAGGAGGGCGGACACCTGCCGC | VEEATVVTSSSATSGEEGGHLPQ |
| | | AGGGGTGGGCGAAGCGGAAGCGGTCGCGCCGCCAGCGATCGGAGGAGGAGAACCTCGCGCTCTGCCTC | GWAKRKRSRRQRSEEENLALCLL |
| | | CTCATGCTCGCCCGCGGCGGCCACCACCGCGTCCAAGCGCCGCCTCCGCTCTCGGCTTCGGCGCCCCC | MLARGGHHRVQAPPPLSASAPPP |
| | | GCCGGCAGGTGCGGAGTTCAAGTGCTCCGTCTGCGGCAAGTCCTTCAGCTCCTACCAGGCGCTCGGCG | AGAEFKCSVCGKSFSSYQALGGH |
| | | GCCACAAGACGAGCCACCGGGTCAAGCTGCCGACTCCGCCCGCAGCTCCCGTCTTGGCTCCCGCCCCC | KTSHRVKLPTPPAAPVLAPAPVA |
| | | GTCGCCGCCTTGCTGCCTTCCGCCGAGGACCGCGAGCCAGCCACGTCATCCACCGCCGCGTCCTCCGA | ALLPSAEDREPATSSTAASSDGA |
| | | CGGCGCGACCAACAGAGTCCACAGGTGTTCCATCTGCCAGAAGGAGTTCCCCACCGGGCAGGCGCTCG | TNRVHRCSICQKEFPTGQALGGH |
| | | GCGGGCACAAGAGGAAGCACTACGACGGTGGCGTAGGCGCCGGCGCCGGCGCATCTTCAACCGAGCTC | KRKHYDGGVGAGAGASSTELLAT |
| | | CTGGCCACGGTGGCCGCCGAGTCCGAGGTGGGCAGCTCCGGCAACGGCCACTCCGCCACCCGGGCGTT | VAAESEVGSSGNGHSATRAFDLN |
| | | CGACCTCAACCTCCCGGCCGTGCCGGAGTTCGTGTGGCGGCCGTGCTCCAAGGGCAAGAAGATGTGGG | LPAVPEFVWRPCSKGKKMWDDEE |
| | | ACGACGAGGAGGAGGTCCAGAGCCCCCTCGCCTTCAAGAAGCCGCGCCTTCTCACCGCGTAA | EVQSPLAFKKPRLLTA* |
| | | SEQ ID NO: 7 | SEQ ID NO: 8 |
| 5 | Xa21_OsJ_26543 | ATGGGGCAGGCTAGGGCTCACCTCCTAGCCTCCCTGTGGGCTTTCTACCTCATCCTAGCAATCTCCAT | MGQARAHLLASLWAFYLILAISM |
| | | GGTCACTGGCGACCTCACCAATGACCTCGACATACTGTGGGGAAACTCAAAGGTGTTCTACGACAGCT | VTGDLTNDLDILWGNSKVFYDSS |
| | | CCGGCAAACAGACTATCTCACTGACTCTTGACCGCTGGACGACCTCCGCGTTCCGGTCGAAGAGCACA | GKQTISLTLDRWTTSAFRSKSTY |
| | | TACCTCTTCAGTAGGATCGACATGGACATCAAGCTCGTTGCTGGAGACTCAGCTGGAACCGTGACTAC | LFSRIDMDIKLVAGDSAGTVTTL |
| | | TCTTTATATGATAACAGAGGGCCTATGGCAATTCCACGACGAGATTGACCTTGAGTTCTTGGGGAACT | YMITEGLWQFHDEIDLEFLGNST |
| | | CCACTGGCGAGCCCTACACCCTGCACACTAACCTGTACGCCAGAGGGAAAGGTGGCAGAGAGAAGCGG | GEPYTLHTNLYARGKGGREKRYK |
| | | TACAAGCTCTGGTTTGATCCCACTGCAGACTTCCATACCTACACCATCATCTGGAACCAAAGAAATAT | LWFDPTADFHTYTIIWNQRNILI |
| | | CCTAATCCTTGTTGATGACAAGCTGATCCGGCAGATCAAGAACAATTTGATGTACAGTGTCCCGTACC | LVDDKLIRQIKNNLMYSVPYPTY |
| | | CAACCTATCAGCCAATGAGGGTGTATGGCAGCATCTGGAATGCCGATGACTGGGCAACAATGGGAGGG | QPMRVYGSIWNADDWATMGGRVK |
| | | CGGGTGAAGACTGACTGGTCGCAGGCGCCATTCACAGCATACTTCCGGAACTACAGGGCTATCGCTTG | TDWSQAPFTAYFRNYRAIACPPQ |
| | | CCCCCCACAACAGAGCTCCCCACTCTGCGGCCAGAGCTCTGGAAATTGGTTCAACCAGGAGCTGGATG | QSSPLCGQSSGNWFNQELDVTRK |
| | | TGACACGGAAACAGCAACTGCAGGAGGTGGATGCCAACTACAAGATCTACGATTACTGCACTGACACC | QQLQEVDANYKIYDYCTDTKRFK |
| | | AAGAGGTTCAAAGATAATCTCCCCAAAGAGTGTACGATAAACTAG | DNLPKECTIN* |
| | | SEQ ID NO: 9 | SEQ ID NO: 10 |
| 6 | Xa21_Os01g0186900 | ATGAGCTCGCTGACGGCGGCGCAGTTCCGGTCGCTGTTTGAGATGGCCGGAGGGGAGGATATCTCGTT | MSSLTAAQFRSLFEMAGGEDISF |
| | | TCTGTTTGGTGATGATGAGGCGGCGGCGGTGGCGGCGCCGGTGGAGTTGCAGGGGAAGAGGGGGTGGG | LFGDDEAAAVAAPVELQGKRGWE |
| | | AGGAGGTGGATCAAGGGGAGGGGTCTGGGGCGGTGGCGGCGAAGAGGCAGCGGTCGCCGACGAGCTCG | EVDQGEGSGAVAAKRQRSPTSSR |
| | | AGGGAGAATAGTAGCGGGAGTAATAATGAGGGTGGGCAGGAGGAGGTGTCTGAGGCGGCGGCGGCCAT | ENSSGSNNEGGQEEVSEAAAAMA |
| | | GGCGGCGGCGGTGGGGAGGGGTGGGGGGAGGAGGCTGTGGGTGAAGGAGAGGGACTCGGAGTGGTGGG | AAVGRGGGRRLWVKERDSEWWDT |
| | | ACACGGTGAGTAGCCCGGATTACCCGGACTCGGAGTTCAGGAAGGCGTTCCGCATGTCCAAGGCCACG | VSSPDYPDSEFRKAFRMSKATFE |
| | | TTCGAGGTGGTCTGCGACGAGCTCGCCGCCGCCGTCGCCAAGGAGGACACCATGCTCCGCGCCGCCAT | VVCDELAAAVAKEDTMLRAAIPV |
| | | CCCGGTGCGCAAGCGCGTCGCCGTCTGCGTCTGGCGCCTCGCCACGGGGGAGCCCCTGAGGCTGGTGT | RKRVAVCVWRLATGEPLRLVSKR |
| | | CCAAGCGCTTCGGCCTCGGGATCTCCACCTGCCACAAGCTCGTGCTCGAGGTGTGCGCCGCGCTCAAG | FGLGISTCHKLVLEVCAALKAMV |
| | | GCCATGGTGATGCCCAAGGTGGTGCGCTGGCCCGAGGCCGGCGACGCGGCGGCCATCGCCGCCCACTT | MPKVVRWPEAGDAAAIAAHFEAI |
| | | CGAGGCCATCTCCGGGATCTCCGGCGTCGTCGGCGCGATCTACACCACCCACATCCCCATCATCGCGC | SGISGVVGAIYTTHIPIIAPKSN |
| | | CCAAGTCCAACGTCGCCTCCTACTACAACCGCCGCCACACGGAGCGCAACCAGAAGACCTCCTACTCC | VASYYNRRHTERNQKTSYSMTVQ |
| | | ATGACCGTCCAGTGCGTCGTCGACTCCACCGGCGCCTTCACCGACGTCTGCATCGGCTGGCCGGGGTC | CVVDSTGAFTDVCIGWPGSNSDE |
| | | CAACTCCGACGAGGAGGTGCTCGAGAAGTCGGCGCTGTACCTGCACCGCGGCGTGCCGGGGCTGATCC | EVLEKSALYLHRGVPGLIQGQWV |
| | | AGGGCCAGTGGGTGGTCGGCGGCGGGAGCTTCCCGCTCATGGACTGGATGCTCGTGCCCTACACCCAC | VGGGSFPLMDWMLVPYTHQNLTW |
| | | CAGAACCTGACATGGGCGCAGCACATGCTCAACGAGAAGGTCGCCGCCGTGCGCGGCGTGGCGCGCGA | AQHMLNEKVAAVRGVARDAFERL |
| | | CGCGTTCGAGCGCCTCAAGCGCCGGTGGGGCTGCCTCCAGAAGCGCACCGAGGTGAAGCTGCTCGACC | KRRWGCLQKRTEVKLLDLPTVLG |
| | | TCCCCACCGTGCTCGGCGCCTGCTGCGTCCTCCACAACATCTGCGAGCGCAGCGGCGACGCCGTCGAC | ACCVLHNICERSGDAVDADDCTF |
| | | GCCGACGACTGCACCTTCGACCTCTTCGACGACGACATGGTCGCCGAGAACGCCGTCCGCTCCACCGC | DLFDDDMVAENAVRSTAAAQARD |
| | | CGCCGCGCAGGCCCGCGACGCCATCGCCCACAACCTCCTCCACAGCGGCGCCGGCGCATCCTTCTTCT | AIAHNLLHSGAGASFF* |
| | | GA SEQ ID NO: 11 | SEQ ID NO: 12 |
| 7 | Xa21_Os01g0802700 | ATGATTACGGGTTCGGAGGTGTACCAGGTGGTGGAGGCGATGGCGCCGCTGTACACGGCGGCGGCGCT | MITGSEVYQVVEAMAPLYTAAAL |
| | | GGGGTACGGGTCGGTGCGGTGGCTGAAGGCGTTCTCCAACGAGCAGTGCGCCGGGATCAACCACTTCG | GYGSVRWLKAFSNEQCAGINHFV |
| | | TGGCGCTCTACGCCGTGCCGGTGCTCATCTTCGACATGGTGTCCACCAACGACGTGTACAAGATGAAC | ALYAVPVLIFDMVSTNDVYKMNG |
| | | GGCCGCCTCATCGCCGCCGACACGCTGCAGAAGGCCGTGCTGCTGCTGGGCCTCATGGCGTGGGCGCT | RLIAADTLQKAVLLLGLMAWALW |
| | | CTGGGAGAGGTCGCGCGCGCGCCGCGCCGGGGCGAAGGCGGTGTCGTCGCCGCTGCAGTGGGTCATCA | ERSRARRAGAKAVSSPLQWVITC |
| | | CCTGCTTCTCCGTCGCGTCGCTGCCCAACACCATCATCATGGGCGTGCCGCTCCTCAACGGCATGTAC | FSVASLPNTIIMGVPLLNGMYGP |
| | | GGGCCCGTGTCCAAGGACCTCATGAAGCAGATCGTCGTCATGCAGTTCTGCATCTGGTACAACGTCAT | VSKDLMKQIVVMQFCIWYNVIIF |
| | | CATCTTCCTCTACGAGTACATGGCGGCGCGTAGATCGGCCTCGGCGCCGCCGCCGGCGTCGTCGGAGG | LYEYMAARRSASAPPPASSEGSA |
| | | GCAGCGCCAAGATCAGCCCTTCGTCGCCGGTGAAAGCTGCGGCGGCGGCGGCGGCGGACGCGAACGGC | KISPSSPVKAAAAAAADANGNAV |
| | | AATGCTGTCGCGGCCGACCGGCCGCAAGAAGTGGCGGTGAACATCGAAATCACGGAGATGGCGGCGTC | AADRPQEVAVNIEITEMAASTAR |
| | | CACGGCACGAGACGGCGTGTCCGGCGAGACGACGGCGGCCGCCAAGGAGGTGAGCGCCGGTGAAGTTG | DGVSGETTAAAKEVSAGEVAPVE |
| | | CTCCGGTGGAAGAAGAGGAGGCCTCTGCGCCAGCGCCGTCGATGAAGCACGTCATCTGGATGGCGGTG | EEEASAPAPSMKHVIWMAVKKLL |
| | | AAGAAGCTGCTACAGATTCCGAATACCTATGCAAGCTTCCTTGGCCTCATCTGGTCTCTAATCGCATT | QIPNTYASFLGLIWSLIAFKCGF |
| | | CAAGTGTGGATTCTCGATGCCAAAAATCGTCGAGGACTCTCTGTTCACCATTCGTACCACCGCTGTTG | SMPKIVEDSLFTIRTTAVGLSMF |
| | | GCCTAAGCATGTTTTCTTCAGGGACGTTCATAGCGCGGCAGTCGCGGTTCGTGCCGTGCGGATACAAG | SSGTFIARQSRFVPCGYKIASFS |
| | | ATCGCGTCGTTCTCCATGGTCATCAAGTTTCTGATAGGCCCGGTTGTGATGCTGTTCGCCTCGCTCGT | MVIKFLIGPVVMLFASLVIGMHG |
| | | CATCGGCATGCACGGCACACTTCTGCACATCGCTGTTGTGCAGGCGGCTCTCCCCCTGGCAGTGACAT | TLLHIAVVQAALPLAVTSFVYAE |
| | | CATTTGTGTACGCTGAAGAGTACAAGGTCCACGCAGACATCATGAGCACAGGGGTTATTCTTGGGATA | EYKVHADIMSTGVILGIFISLPV |
| | | TTTATATCACTTCCTGTGACAATTGTTTACTATATTCTGTTGGGGCTGTGA | TIVYYILLGL* |
| | | SEQ ID NO: 13 | SEQ ID NO: 14 |
| 8 | Xa21_OJ1759_F09.33 | ATGGCGAAGGCGAGCATGGTGGTGCCTGAGCAGGTGGGCGCGGCGGCGGCGGCGCAGGTGGGGTGCCC | MAKASMVVPEQVGAAAAAQVGCP |
| | (Os09g0369400) | CTGTCCGGGCACGACGCTGTTCCCGTACCCGCCGCCGCGCGCCGGGATCGCCGTGCGGCGCAAGTGCC | CPGTTLFPYPPPRAGIAVRRKCL |
| | | TGCAGGCGGCGCAGCAGCTGGAGCTCGGCGCCGGGCTGCGCGGCGGCTGGGTGGAGTCCATGCGGGCG | QAAQQLELGAGLRGGWVESMRAS |
| | | TCGTCGCCCACCCACGCCAAGGCCGCCGCCGCCCTCGCCGCCGGCGTCGACGAGGAGCACGCCGCCTG | SPTHAKAAAALAAGVDEEHAAWM |
| | | GATGGTCCGTTTCCGTTCACCGATTGATCGATGTTCGTCGCGTTCTTGGCGCGCGCGCGCTGACACTG | VRFRSPIDRCSSRSWRARADTDM |
| | | ACATGAACCGTGCATTTCCGTTCGTCTTTGTGCAGGCGAGGCACCCGTCGGCGCTGGGCGAGTTCGAG | NRAFPFVFVQARHPSALGEFEKV |
| | | AAGGTGGTGGCGGCGTCGAAGGGGAAGCAGATCGTCATGTTCCTCGACTACGACGGCACCCTCTCCCC | VAASKGKQIVMFLDYDGTLSPIV |
| | | CATCGTCGACGACCCCGACGCCGCCTTCATGAGCGAGACGATGCGGATGGCCGTGCGCAGCGTGGCGA | DDPDAAFMSETMRMAVRSVAKHF |
| | | AGCACTTCCCGACGGCGATCGTGAGCGGGCGGTGCCGCGACAAGGTGTTCGAGTTCGTCAAGCTCGCC | PTAIVSGRCRDKVFEFVKLAELY |
| | | GAGCTGTACTACGCGGGGAGCCACGGCATGGACATCAAGGGCCCCGCCTCCCGCCACGCCGCCGTCAA | YAGSHGMDIKGPASRHAAVKSPP |
| | | GTCTCCTCCCCACAACAAGGGCGTCCTCTTCCAGCCGGCCAGCGAGTTCCTCCCCATGATCGAGCAGG | HNKGVLFQPASEFLPMIEQVHDR |
| | | TGCACGACCGCCTCGAGCAGGCGACCCGCTCCATCCCGGGCGCCAAGGTCGAGAACAACAAGTTCTGC | LEQATRSIPGAKVENNKFCVSVH |
| | | GTCTCCGTCCACTTCCGGTGCGTCGACGAGAAGAGTTGGGGGGCGTTGGCGGAGACGGTGAGGAGGGT | FRCVDEKSWGALAETVRRVVREF |
| | | GGTGAGGGAGTTCCCGCGGCTGCGGCTGAGCCAGGGGAGGATGGTGTTCGAGGTGCGGCCGACCATCA | PRLRLSQGRMVFEVRPTIKWDKG |
| | | AGTGGGACAAGGGCAAGGCCCTCGAGTTCCTCCTCGACTCGCTCGGTTTCGCCGACTGCAGCGACGTG | KALEFLLDSLGFADCSDVLPVYI |
| | | CTGCCGGTCTACATCGGCGACGACCGCACGGACGAGGACGCGTTCAAGGGCCTGGGGATCCTGGTGTC | GDDRTDEDAFKGLGILVSKHPKE |
| | | GAAGCACCCCAAGGAGACGACCGCCTCCTTCTCCCTCCAGGAGCCCGCCGAGGTGATGGAGTTCTTGC | TTASFSLQEPAEVMEFLLRLVEW |
| | | TGCGGCTCGTGGAGTGGAATCGCCTGTCCAGGACACGGTTGAGGCTGTAA | NRLSRTRLRL* |
| | | SEQ ID NO: 15 | SEQ ID NO: 16 |
| 9 | Xa21_OsI_24487 | ATGCCTCACTCCTCCTACCTCGCCCTCGCCCTCGCCGTTGCGGCGGTTCTTGCTATGGCCGCCGTCGA | MPHSSYLALALAVAAVLAMAAVE |
| | | GGTGTCCGGCCTCGGCTTCGACCTCCACCACCGCTACTCCCCCATCGTGCAGCGGTGGGCGGAGGAGC | VSGLGFDLHHRYSPIVQRWAEER |
| | | GTGGCCACGCCGGCGTGTCCTGGCCTGCCGGCGCCGAGGTGATCGGCTCGCCCGAGTACTACTCCGCG | GHAGVSWPAGAEVIGSPEYYSAL |
| | | CTGTCCCGACACGACCACGCCCTCTTCGCGCGACGCGGGCTCGCCCAGGGCGACGGCCTCGTCACCTT | SRHDHALFARRGLAQGDGLVTFA |
| | | CGCCGACGGCAACATCACCCTGCGGCTCGACGGATCGCTGCACTACGCGGAGGTGGCGGTGGGCACGC | DGNITLRLDGSLHYAEVAVGTPN |
| | | CAAACACGACGTTCCTGGTGGCGCTCGACACCGGCAGCGACCTCTTCTGGGTGCCCTGCGACTGCAAG | TTFLVALDTGSDLFWVPCDCKQC |
| | | CAGTGCGCTCCCCTCGGCAACCTCACGGCGGTGGACGGCGGCGGCGGCCCGGAGCTCAGGCAGTACAG | APLGNLTAVDGGGGPELRQYSPS |
| | | CCCGAGCAAGTCGTCGACGAGCAAGACGGTCACCTGCGCCAGCAACCTCTGCGACCAGCCCAACGCCT | KSSTSKTVTCASNLCDQPNACAT |
| | | GCGCCACGGCCACCAGCAGCTGCCCCTACGCCGTCCGCTACGCCATGGCCAACACCTCCTCCTCCGGC | ATSSCPYAVRYAMANTSSSGELV |
| | | GAGCTCGTCGAGGACGTGCTCTACCTCACCAGGGAGAAGGGCGCCGCCGCCGCCGCCGGAGCCGCCGT | EDVLYLTREKGAAAAAGAAVKTP |
| | | GAAAACTCCCGTGGTGTTCGGGTGCGGGCAGGTGCAGACGGGCTCGTTCCTCGACGGCGCCGCCGCCG | VVFGCGQVQTGSFLDGAAADGLM |
| | | ACGGCCTCATGGGTCTCGGCATGGAGAAGGTGTCCGTGCCCAGCATCCTCGCCAGCACCGGCGTCGTC | GLGMEKVSVPSILASTGVVKSNS |
| | | AAGTCGAACAGCTTCTCCATGTGCTTCAGCAAAGACGGCCTCGGCCGGATCAACTTCGGCGACACCGG | FSMCFSKDGLGRINFGDTGSADQ |
| | | CAGCGCCGACCAGTCCGAGACGCCATTCATCGTCAAATCCACACACTCGTACTACAACATCAGCATCA | SETPFIVKSTHSYYNISITSMSV |
| | | CGTCGATGAGCGTCGGGGACAAGAACTTGCCGTTGGGGTTCTACGCCATTGCTGACTCCGGCACGTCC | GDKNLPLGFYAIADSGTSFTYLN |
| | | TTCACCTACCTCAACGACCCGGCCTACACGGCCTACACCACCAATTTCAACGCGCAGATCAGCGAGAG | DPAYTAYTTNFNAQISERRANFS |
| | | GAGGGCCAACTTCAGCGGCAGTACTCGTTCTGGTCCATTTCCTTTCGAGTACTGCTACTCGTTGAGTC | GSTRSGPFPFEYCYSLSPDQTTV |
| | | CTGATCAAACAACGGTGGAACTGCCTATTGTGAGCCTGACGACCAATGGAGGAGCCGTGTTCCCGGTG | ELPIVSLTTNGGAVFPVTRPVYP |
| | | ACCAGGCCTGTTTACCCCATCGCGGTTCAGATGACAAATGGAAAGATTCGTGTCATTGGTTACTGCCT | IAVQMTNGKIRVIGYCLAVIKSD |
| | | GGCTGTCATCAAGAGCGATCTCCCCATCGACATCATTGGCCAGAACTTCATGACCGGGCTCAAGGTCG | LPIDIIGQNFMTGLKVVFNREKS |
| | | TCTTCAACCGTGAGAAATCCGTCCTGGGCTGGCAAAAGTTCGACTGTTACAAGGACGAGAAGATGACA | VLGWQKFDCYKDEKMTDDGSGVG |
| | | GACGACGGGTCAGGCGTCGGGAGCCCGAGCCCATCGCCGGGGCCGACCACCCACGTCTTCCCGCAGCC | SPSPSPGPTTHVFPQPQESDSPA |
| | | GCAGGAGAGCGACTCGCCGGCGGGCAGAACGCCCATCCCCGGCGCGGCGCCGGTGCCGCGGTCGAGCA | GRTPIPGAAPVPRSSSAAAGGRA |
| | | GCGCGGCAGCTGGCGGCCGTGCAGGCGTCCGGCTCCTGTCGTCCATGGCGCTCATGCTGCTGGCTGCT | GVRLLSSMALMLLAAATVVF* |
| | | GCTACAGTAGTTTTCTGA SEQ ID NO: 17 | SEQ ID NO: 18 |
| 10 | Xa21_Os04g0119500 | ATGTCGGCGTTGCTCGATCTGCTCATGGGGGTCTTCCGCCAGCCGACCCTCGGCGGCGTCGCCCTCGA | MSALLDLLMGVFRQPTLGGVALE |
| | | GCTCGCCTCCCTCGCCGCGCCGCTCTGGCTCGCCGCCCTCGTCGGCCTACTCATCGGCTGGGCGTGGC | LASLAAPLWLAALVGLLIGWAWR |
| | | GCCCGCGCTGGGCCCTCGCCGTCGTCGGGGAGGCGCCGCCGGAGACCCCCGCCCTTCCGCCACCGCGC | PRWALAVVGEAPPETPALPPPRA |
| | | GCCGCCGCCGAGGACTCCTGCCGCAACAACGAGCTTGTACCCGTCGTTCCTAGAACTGCGGTTGCCGC | AAEDSCRNNELVPVVPRTAVAAA |
| | | CGCCACGCCAGTGGAGGATGAGGGATTGGCCGTCGACACCGGAGATTTGATGCACCTCCGCCGCCTTG | TPVEDEGLAVDTGDLMHLRRLVE |
| | | TCGAGGAGAAGGACGGCGGGCCGGCGTGGATTCACATGATGGACAAGACGCTGCCCACGATGCGCTAC | EKDGGPAWIHMMDKTLPTMRYQA |
| | | CAAGCATGGAGGAGAGATCCTGAGGGTGGCCCGCCTCAATACCGCACTAGCACTATCTTTGAGGATGC | WRRDPEGGPPQYRTSTIFEDASP |
| | | ATCGCCAGAAGTTGTCAGGGATTTCTTCTGGGATGATGAGTTCCGGATTAAGAACACTTGGGACGACA | EVVRDFFWDDEFRIKNTWDDMLL |
| | | TGCTTCTTCAGCACGAGACGTTGGAGGAGTGCACAAAGACTGGAACGATGGTTCTCCGGTGGGTCAGG | QHETLEECTKTGTMVLRWVRKFP |
| | | AAGTTCCCGTTCTTCTGCAGTGACAAGGAGTACATTATCGGTCGCAGGATATGGGCATCTGGAAAGAC | FFCSDKEYIIGRRIWASGKTYYC |
| | | GTATTACTGTGTAACAAAGGGTGTGCCTCGCCCCTCTGTTCCAAGGTGCAACAAACCTCGTCGTGTGG | VTKGVPRPSVPRCNKPRRVDVYY |
| | | ACGTGTACTACTCTAGTTGGTGCATCCGTCCAGTCGAAGCAAGAAACGGTGATGGCTCAATGACCGCA | SSWCIRPVEARNGDGSMTACEVL |
| | | TGTGAGGTGCTCCTGTTCCATCATGAGGAAATGGGGATTCCAAGGGAAATTGCAAAGCTCGGTGTTCG | LFHHEEMGIPREIAKLGVRQGMW |
| | | GCAGGGGATGTGGGGCTGCGTCAAAAGGATTGAGCCTGGCTTGAGGGCATACCAAATCGCAAGGACTG | GCVKRIEPGLRAYQIARTAGEPL |
| | | CTGGCGAGCCCCTTTCAAAATGCGCTGCCATGGCACATGTCAACACGAAGGTTGATCCTGATGAGCTC | SKCAAMAHVNTKVDPDELITAED |
| | | ATCACTGCAGAGGACAAGACCGAGGCCAGTTCAACCAACAACGCTGAAGCTGAGAAACCAAAGCACTG | KTEASSTNNAEAEKPKHWTGNIP |
| | | GACAGGCAATATACCCAAAGTCATCCTTGTAGGTGGCGCAGTTGCCCTGGCATGCACGTTTGACCATG | KVILVGGAVALACTFDHGLLTKA |
| | | GACTGTTAACAAAGGCTCTCATATTTGGTACGGCGAGGAGGTTTGCAGGACCAGGAAGGAGATGA | LIFGTARRFAGPGRR* |
| | | SEQ ID NO: 19 | SEQ ID NO: 20 |
| 11 | Xa21_Os10g0455100 | ATGGCAGGCACTAAGCTTGCAGCTCTTGGGTTTATTGTCCTCTTGAGCATTGGATTAGCTAGTGCTGT | MAGTKLAALGFIVLLSIGLASAV |
| | | AAGGGTAGAAAGATACTCAAATGCCCAAGGTTCGGGCACAGGAAGTGGAGAGGGCACAGGAAGCGTGA | RVERYSNAQGSGTGSGEGTGSVN |
| | | ACGGTGCGGGAGCTGGGTTGGGAAGTGGGACTGGGTCTGGTAGCAGTGGTTACAATGGTGCCCATGCA | GAGAGLGSGTGSGSSGYNGAHAS |
| | | AGTGGTGGAGGAGGAGGCGGAGGCGGTGGTTACAGCCAATATGGTGGGTCAGGGTCTGGTAGTGGATC | GGGGGGGGGYSQYGGSGSGSGSG |
| | | TGGTTCGGGCTCAGGCTCTAGCCAGACCAGTCAAAATGGGTATTATGGTTATGGTGGATCATCAAGTG | SGSGSSQTSQNGYYGYGGSSSAG |
| | | CTGGCGGTAGCGGTGCTGGTGCTGGAGCTGGACAAGCTGGTGGTTACTGGCCATCCTACGGTCATGGG | GSGAGAGAGQAGGYWPSYGHGSG |
| | | TCTGGTAGTGGTACCGGCTCAGGCTCTAGTGAGGCTACTAATACCTGGTATGGACAGTATGCAAATGC | SGTGSGSSEATNTWYGQYANANA |
| | | AAATGCTGGTGGCAACGGTGGTGGTAACGGTCAGGGCCAATATGGTGGCAGCGGTGCTGGTGTAGGTT | GGNGGGNGQGQYGGSGAGVGSGS |
| | | CTGGATCTGGGTTCGGTGATGCGAACCCTTAA SEQ ID NO: 21 | GFGDANP* SEQ ID NO: 22 |
| 12 | Xa21_P0512G09.2-1 | ATGGCCGGAGGGGAGGATATCTCGTTTCTGTTTGGTGATGATGAGGCGGCGGCGGTGGCGGCGCCGGT | MAGGEDISFLFGDDEAAAVAAPV |
| | | GGAGTTGCAGGGGAAGAGGGGGTGGGAGGAGGTGGATCAAGGGGAGGGGTCTGGGGCGGTGGCGGCGA | ELQGKRGWEEVDQGEGSGAVAAK |
| | | AGAGGCAGCGGTCGCCGACGAGCTCGAGGGAGAATAGTAGCGGGAGTAATAATGAGGGTGGGCAGGAG | RQRSPTSSRENSSGSNNEGGQEE |
| | | GAGGTGTCTGAGGCGGCGGCGGCCATGGCGGCGGCGGTGGGGAGGGGTGGGGGGAGGAGGCTGTGGGT | VSEAAAAMAAAVGRGGGRRLWVK |
| | | GAAGGAGAGGGACTCGGAGTGGTGGGACACGGTGAGTAGCCCGGATTACCCGGACTCGGAGTTCAGGA | ERDSEWWDTVSSPDYPDSEFRKA |
| | | AGGCGTTCCGCATGTCCAAGGCCACGTTCGAGGTGGTCTGCGACGAGCTCGCCGCCGCCGTCGCCAAG | FRMSKATFEVVCDELAAAVAKED |
| | | GAGGACACCATGCTCCGCGCCGCCATCCCGGTGCGCAAGCGCGTCGCCGTCTGCGTCTGGCGCCTCGC | TMLRAAIPVRKRVAVCVWRLATG |
| | | CACGGGGGAGCCCCTGAGGCTGGTGTCCAAGCGCTTCGGCCTCGGGATCTCCACCTGCCACAAGCTCG | EPLRLVSKRFGLGISTCHKLVLE |
| | | TGCTCGAGGTGTGCGCCGCGCTCAAGGCCATGGTGATGCCCAAGGTGGTGCGCTGGCCCGAGGCCGGC | VCAALKAMVMPKVVRWPEAGDAA |
| | | GACGCGGCGGCCATCGCCGCCCACTTCGAGGCCATCTCCGGGATCTCCGGCGTCGTCGGCGCGATCTA | AIAAHFEAISGISGVVGAIYTTH |
| | | CACCACCCACATCCCCATCATCGCGCCCAAGTCCAACGTCGCCTCCTACTACAACCGCCGCCACACGG | IPIIAPKSNVASYYNRRHTERNQ |
| | | AGCGCAACCAGAAGACCTCCTACTCCATGACCGTCCAGTGCGTCGTCGACTCCACCGGCGCCTTCACC | KTSYSMTVQCVVDSTGAFTDVCI |
| | | GACGTCTGCATCGGCTGGCCGGGGTCCAACTCCGACGAGGAGGTGCTCGAGAAGTCGGCGCTGTACCT | GWPGSNSDEEVLEKSALYLHRGV |
| | | GCACCGCGGCGTGCCGGGGCTGATCCAGGGCCAGTGGGTGGTCGGCGGCGGGAGCTTCCCGCTCATGG | PGLIQGQWVVGGGSFPLMDWMLV |
| | | ACTGGATGCTCGTGCCCTACACCCACCAGAACCTGACATGGGCGCAGCACATGCTCAACGAGAAGGTC | PYTHQNLTWAQHMLNEKVAAVRG |
| | | GCCGCCGTGCGCGGCGTGGCGCGCGACGCGTTCGAGCGCCTCAAGCGCCGGTGGGGCTGCCTCCAGAA | VARDAFERLKRRWGCLQKRTEVK |
| | | GCGCACCGAGGTGAAGCTGCTCGACCTCCCCACCGTGCTCGGCGCCTGCTGCGTCCTCCACAACATCT | LLDLPTVLGACCVLHNICERSGD |
| | | GCGAGCGCAGCGGCGACGCCGTCGACGCCGACGACTGCACCTTCGACCTCTTCGACGACGACATGGTC | AVDADDCTFDLFDDDMVAENAVR |
| | | GCCGAGAACGCCGTCCGCTCCACCGCCGCCGCGCAGGCCCGCGACGCCATCGCCCACAACCTCCTCCA | STAAAQARDAIAHNLLHSGAGAS |
| | | CAGCGGCGCCGGCGCATCCTTCTTCTGA | FF* |
| | | SEQ ID NO: 23 | SEQ ID NO: 24 |
| 13 | Xa21_OsI_03946 | ATGGCGTCGCTCACCACCACCGCCGCCGCGTCCTCCCCGGCCGCGCTGCCGGCGGCCTCGACCACCGC | MASLTTTAAASSPAALPAASTTA |
| | | CCCGGCGTCGTCCGTGTCCCCGGCCGCCGCGGCCGCCAAGCGGCCGCACCTCGCCGGGGACGACGCGC | PASSVSPAAAAAKRPHLAGDDAP |
| | | CGTGGCGGGCGGCGACCGGCGCCGCGGGGATCCGCCCCGTCCCGCGCATCCACCACGCCCCCGTCCTC | WRAATGAAGIRPVPRIHHAPVLR |
| | | CGCGTCGCGCAGGACGATTATTCCGCCTACGCCCTCGCCGTCATGAAGCATCCGGATCCGATAGGGGA | VAQDDYSAYALAVMKHPDPIGEG |
| | | GGGGTTGGCCATGGAGGCTATGGTGGAGGCGGCCGGGCCGGAGTGCATCGTGCCCGGGCAGCAGGCGC | LAMEAMVEAAGPECIVPGQQAPL |
| | | CGCTGCGGCTGCTGGGCCTCAAGGTTTGGCCCCTTGATATAGAGATGAAGTTCCTGGAGCCATTTGGA | RLLGLKVWPLDIEMKFLEPFGRE |
| | | CGGGAACTACATTCCATGAAAAAGTTCATGGACAAGTCATGCAGCGTTATGGACTCATCTATGTCAAA | LHSMKKFMDKSCSVMDSSMSNK* |
| | | TAAGTAG SEQ ID NO: 25 | SEQ ID NO: 26 |
| 14 | Xa21_Os03g0241900 | ATGGCCGCCAAGCAGAGCCTCTACCCGGAGGTGAACCAGTCCCACCCCGACCTCAACACCGCCTTCCT | MAAKQSLYPEVNQSHPDLNTAFL |
| | | CGCCAACCCCAACCGCGCCGCCACCGCCAGCCCCGGCGGCTCGCTCTACCCCTCCGTCGACCCGCAGC | ANPNRAATASPGGSLYPSVDPQQ |
| | | AGCTCGCCGAGAACCTCTTCCCCGACGCCGCCGATGACGCCGCGCCGCCGCCTCCCACCACCGAGGAG | LAENLFPDAADDAAPPPPTTEEA |
| | | GCCCTCGTCGCGGTTCCGGGCGCGCAGCTCCACCTCGTCGACCCCGACCGCAGCATGGACCTCGGTGC | LVAVPGAQLHLVDPDRSMDLGAG |
| | | CGGCACGCTCTCCGTCGTCCGCCTCCGCCAGGGGGACCACTCCGTCGCCGTCCTCGCGAGGCTCGTCC | TLSVVRLRQGDHSVAVLARLVPE |
| | | CGGAGAAGCGCAGCCAGCGCCGCGGCGGCCTCTTCGGCTTCTTGAGCGGCGGCGGGAAGGCCGGCGAC | KRSQRRGGLFGFLSGGGKAGDGA |
| | | GGCGCCGCGCAGGAGCCCGTGCAGTGGCCGCTCACCCGCGACGTCGCCGCCGTCAAGCTCGACACCGC | AQEPVQWPLTRDVAAVKLDTAHY |
| | | GCACTACTTCTTCTCGCTCCACGTCCCGCACACAGATCACGAGGATGACGACGCCGAGGAGGCCGAGG | FFSLHVPHTDHEDDDAEEAEAEK |
| | | CGGAGAAGGACGCGGACGGGGAGGCGGCGCTGAGCTACGGGCTCACGGTCGCCAGCAAGGGGCAGGAG | DADGEAALSYGLTVASKGQEAVL |
| | | GCGGTCCTGGCCCAGCTGGACAAGGTACTGGAGGAGTACACCACCTTCTCGGTGAAGCAAGTGGAACC | AQLDKVLEEYTTFSVKQVEPAAK |
| | | CGCGGCGAAGGAGAAGTCGGGGGTGATGGACACGAAGGCGGTGACGGAGATCACGCCGGAGGAGGCCG | EKSGVMDTKAVTEITPEEAVGDK |
| | | TTGGGGACAAGAAGGAGGTGGTGGAGGAGCAATCGGCGGCGTTCTGGACGACGATCGCGCCGAACGTT | KEVVEEQSAAFWTTIAPNVDDYS |
| | | GACGACTACAGCTCGTCGGTGGCGAGGCTGATCGCGCGAGGCTCGGGGCAGCTGGTGAGGGGCATCAT | SSVARLIARGSGQLVRGIIWCGD |
| | | CTGGTGCGGGGACATCACAGCGGAGGGCCTCCGGTGTGGGGAGGCGGTGATGAAGAAGAGCGTGGGGC | ITAEGLRCGEAVMKKSVGPSGKP |
| | | CGAGTGGGAAGCCGTCACAGGTGAAGCCGAGCACTATCAGGAGGATGAAGAGGGCTAGAAGGGTTACG | SQVKPSTIRRMKRARRVTKMSNR |
| | | AAGATGTCCAACAGGGTAGCAAATTCAATCCTCTCTGGTGTTCTAAAGGTCTCTGGGTTTGTTACCAG | VANSILSGVLKVSGFVTSTVLNS |
| | | CACTGTGCTGAACTCGAAACCTGCCCAGAAATTCTTTAAGTTGATGCCGGGCGAAGTTATTCTTGCTT | KPAQKFFKLMPGEVILASLDGFG |
| | | CACTCGATGGATTTGGGAAAGTATGGGATGCTGTAGAGGTGTCTGGAAAGAATGTGATGCGGACATCG | KVWDAVEVSGKNVMRTSSVVTTS |
| | | TCGGTTGTGACAACTTCTGTTGTAACACATAGATACGGAGATCAAGCTGGACAGGTCACACAGGATTA | VVTHRYGDQAGQVTQDYLHATGN |
| | | CCTTCACGCCACTGGAAACGCTCTTGGAGTCGCATGGGCTGTCTTCAAAATTCGGAAAGCTCTCGACC | ALGVAWAVFKIRKALDPKGNLKK |
| | | CAAAGGGCAATCTGAAGAAGTCGTCTCTGGCGAGCGCTGCAGCCCATGCTGTAGCTAAAGAATCGATA | SSLASAAAHAVAKESISRQKRK* |
| | | TCTCGGCAAAAAAGGAAGTGA SEQ ID NO: 27 | SEQ ID NO: 28 |
| 15 | Xa21_Os05g0498400 | ATGTCTGATCTCGACGTTCAGCTTCCATCTGCCTTCGATCCGTTTGCTGAGGCAAATGCTGAGGACTC | MSDLDVQLPSAFDPFAEANAEDS |
| | | CGGCGCTGGCCCTGGAGCAAAGGATTATGTGCATGTGCGCATCCAGCAGCGCAACGGCAGAAAGAGTC | GAGPGAKDYVHVRIQQRNGRKSL |
| | | TAACTACTGTTCAGGGCTTAAAGAAGGAGTACAGTTACAACAAGATCCTCAAGGATCTGAAAAAGGAG | TTVQGLKKEYSYNKILKDLKKEF |
| | | TTCTGCTGCAATGGTACTGTAGTCCAAGATCCGGAGCTTGGCCAGGTCATTCAGCTTCAAGGTGATCA | CCNGTVVQDPELGQVIQLQGDQR |
| | | GCGTAAGAATGTTGCCACGTTCCTAGTTCAGGCTGGGATTGCTAAGAAGGACAACATCAAGATTCACG | KNVATFLVQAGIAKKDNIKIHGF |
| | | GTTTCTAA SEQ ID NO: 29 | * SEQ ID NO: 30 |
| 16 | Xa21_Os05g0585500 | ATGGGCGCCCGCGCCTCTCGCCACCGCCAATCCCCCGACCAATCCCAATCCCAATCCCAATCCCCATC | MGARASRHRQSPDQSQSQSQSPS |
| | | CCCACACCACAAGCACCACCACCACCACCAAACCACCCGGGCCCCCAAGCCCAAGCCCAAGCCCCAGC | PHHKHHHHHQTTRAPKPKPKPQP |
| | | CGCCGCCGCCGCCGCAGCAGCAGCCGCGGTCTCAGCCTCCGCCGCCGCCGCCGCGGCAGCAGCTCCAG | PPPPQQQPRSQPPPPPPRQQLQP |
| | | CCCCAGCAGGCGGCGGCGGAGGATGGGGTGGGGCGGGTGCTGGGGCGGCCCATGGAGGACGTCCGGGC | QQAAAEDGVGRVLGRPMEDVRAT |
| | | GACCTACACCTTCGGGCGGGAGCTGGGGCGGGGGCAGTTCGGGGTGACCTACCTCGCCACCCACAAGC | YTFGRELGRGQFGVTYLATHKPT |
| | | CCACCGGCCGACGCTACGCCTGCAAGTCCATCGCCGCCCGCAAGCTCGCCCGCCCCGACGACCTCGAC | GRRYACKSIAARKLARPDDLDDV |
| | | GACGTCCGCCGCGAGGTCCACATCATGCACCACCTCACCGGCCACCGCAACATCGTCGAGCTGCGCGG | RREVHIMHHLTGHRNIVELRGAY |
| | | CGCCTACGAGGACCGCCACTCCGTCAACCTCGTCATGGAGCTCTGCGAGGGCGGCGAGCTCTTCGACC | EDRHSVNLVMELCEGGELFDRII |
| | | GCATCATCGCCAGGGGCCACTACTCCGAGCGCGCCGCCGCCGCCCTCTGCAGGGAGATCGTCTCCGTC | ARGHYSERAAAALCREIVSVVHS |
| | | GTCCACAGCTGCCACTCCATGGGGGTCATGCACAGGGACCTCAAGCCCGAGAACTTCCTCTTCCTCAA | CHSMGVMHRDLKPENFLFLNKRE |
| | | CAAGCGCGAGGACTCCCCGCTCAAAGCCACCGATTTTGGCCTCTCCGTCTTCTTCAAGCCCGGTGAGC | DSPLKATDFGLSVFFKPGEQFRD |
| | | AGTTCAGAGATCTTGTTGGAAGTGCATATTATGTGGCTCCTGAAGTCCTCAAACGACGCTATGGAGCT | LVGSAYYVAPEVLKRRYGAEADI |
| | | GAGGCAGACATATGGAGTGCTGGAGTTATCCTTTACATCCTTCTATCAGGCGTTCCTCCGTTCTGGGC | WSAGVILYILLSGVPPFWAENED |
| | | AGAAAACGAGGACGGTATATTTGATGCTGTTCTGCAAGGTCATATCGACTTCTCATCTGAACCATGGC | GIFDAVLQGHIDFSSEPWPSISS |
| | | CTTCTATATCTAGTGGCGCAAAAGACTTGGTCAAGCGGATGCTTCGGCAGGACCCAAAGGAGCGGTTA | GAKDLVKRMLRQDPKERLTAAEI |
| | | ACTGCTGCTGAAATTTTGAACCACCCATGGATTAGAGAGGATGGAGAGGCCCCAGATAAACCACTTGA | LNHPWIREDGEAPDKPLDITVIS |
| | | TATTACAGTGATCAGTAGAATGAAGCAGTTCAGAGCAATGAACAAACTTAAGAAGGTTGCCTTGAAGG | RMKQFRAMNKLKKVALKVVAENL |
| | | TCGTTGCAGAGAACTTGTCAGAGGAAGAGATTGTGGGTTTAAAGGAAATGTTCAAATCTTTAGATACT | SEEEIVGLKEMFKSLDTDNSGTI |
| | | GATAACAGTGGGACAATAACTCTTGAAGAACTAAGAGCTGGTCTACCAAAGCTTGGCACTAAAATTTC | TLEELRAGLPKLGTKISESELRQ |
| | | GGAATCAGAATTAAGGCAGTTGATGGAAGCGGCTGATGTTGATGGAAATGGGTCCATTGATTATGTTG | LMEAADVDGNGSIDYVEFISATM |
| | | AATTTATATCAGCAACGATGCACATGAATAGATTAGAGAAGGAAGATCACATATATAAAGCATTTGAA | HMNRLEKEDHIYKAFEYFDKDHS |
| | | TATTTTGACAAGGACCACAGCGGGTTCATAACAGTCGATGAATTGGAAGAAGCTCTGACGAAGTACGA | GFITVDELEEALTKYDMGDEATI |
| | | CATGGGTGATGAAGCGACAATTAAAGAAATAATTGCTGAAGTGGATACAGACCATGATGGAAGAATTA | KEIIAEVDTDHDGRINYQEFVAM |
| | | ACTACCAGGAGTTTGTTGCCATGATGAAGAACAACAGCCCTGAGATTGTTCCAAATCGACGGCGGATG | MKNNSPEIVPNRRRMF* |
| | | TTTTAA SEQ ID NO: 31 | SEQ ID NO: 32 |
| 17 | Xa21_Os07g0680600 | ATGGCAATCTCAGACGCCAGAGTGGTTCGCCATGTGAGGTGTCCCAAATGCTTCAGTGTTCTTCAGGA | MAISDARVVRHVRCPKCFSVLQE |
| | | GCCCACCGGCGCGCCGGTGTACCAATGCGGTGGATGCGGCACTACCCTCCGAGCGAAAAACCGCACCG | PTGAPVYQCGGCGTTLRAKNRTG |
| | | GCAACTCACAGGAGGTGATCAGTGCTCCCTCCTCTTTGGGGAGTGGCCTGCCTCCTCACAGCAAGCAC | NSQEVISAPSSLGSGLPPHSKHL |
| | | CTGGGCTCCAGTGATGTTGCAAGCACCAGTGGATCCACTCCTGAAGCTCAAATCAGCGGTGGGCAGCA | GSSDVASTSGSTPEAQISGGQQG |
| | | AGGAGCTGACATGACAAGCCGACGCGAGACCGATGATCTCGTGTCGGCGAGGAACAATGCTCCTGAGC | ADMTSRRETDDLVSARNNAPERV |
| | | GAGTGGTGCCAGCTGAGGAGGAGGAAGAGCATGTTCAGAGTATTAGTCAGCTAGCTGTTGGCAATTCT | VPAEEEEEHVQSISQLAVGNSED |
| | | GAAGATCTCACAAGAGGAGATGCAGCTACTGCAGCTGATGCACAGTGCAGTGACAGAGCATCTGAAGG | LTRGDAATAADAQCSDRASEGKV |
| | | CAAGGTGCAATTTTCAGAGAGAAGAGAAGACAGTAACACCAATCTACAAGATGTTCAGCGAAGCAGAG | QFSERREDSNTNLQDVQRSRDDE |
| | | ATGACGAATCTGATGCTGAAGGCAAGAAAAGTTCAGAGGAAACATCCCAATCTCCGCGCCACGATGTC | SDAEGKKSSEETSQSPRHDVVEL |
| | | GTCGAGCTTCCACCAAGTTCAGCTCAAACCCCAGACTCACAACCTGCACCGGCCGTGTTGAGAAGGGA | PPSSAQTPDSQPAPAVLRREDDP |
| | | GGATGATCCGGCGACGAGTCCTCCTCATGGCCATGCGCGTCGATCACCAGAGAACTTGGCGCCGCTTC | ATSPPHGHARRSPENLAPLQKRI |
| | | AGAAGAGGATCCTGAAGACAGTGGACAACCTGAAAGACGACCTCTCTGAACTTTTCAGTAAATCTCCT | LKTVDNLKDDLSELFSKSPELNK |
| | | GAACTGAACAAGCCAAGGACGCACGCGCGCCCTCCTCGTCTTCCCAGGCAAGAAGGCTACGCTCCTCG | PRTHARPPRLPRQEGYAPRDAAM |
| | | CGACGCGGCCATGGCGGCGGCGGCGAGCATCCAAGCCATCAGAGCGCGTCACGCAGCTGTCCACCGTC | AAAASIQAIRARHAAVHRPGYIA |
| | | CCGGCTACATAGCTCGTGCAGGCAAGCCTGGTCAGCTCGCTGCTCCACCTCCACCACGTGGTTTGCCG | RAGKPGQLAAPPPPRGLPSRRYR |
| | | TCGCGGCGCTACCGCCGGTGCAGGGCTGATCACCCGTGCTGCCACGACGCGCGCCATGGGCCGTCGTG | RCRADHPCCHDARHGPSCHHGCC |
| | | CCATCACGGTTGCTGCCCCCCTCACCATGGCAAGCAAGCGTGCACCAGCTGCCGGGGACAACATTGCT | PPHHGKQACTSCRGQHCCRPRTQ |
| | | GCCGGCCAAGAACGCAAGAACCTCCTGCGCCGCGGCGGCCGGCGGCGGCGGCGGCAAAGGAGGTCGTC | EPPAPRRPAAAAAKEVVKRRAPP |
| | | AAGCGGCGGGCGCCACCCAGGAACCATTGCCGGCCGGTGCTCAAGGGCGCGCCGTTCATCATCTGCTC | RNHCRPVLKGAPFIICSSCFKLV |
| | | CAGCTGCTTCAAGCTGGTCCAGGTGCCCGCCGACTTCGCCGTCTCGACCAAGACGGTGCGCAAGCTGC | QVPADFAVSTKTVRKLRCGSCSA |
| | | GTTGCGGCTCATGCTCCGCCGTCCTCTGCTACTCCTACCGGGACCCCGACAGGAAGAAGCACGGCGAT | VLCYSYRDPDRKKHGDQYSADGS |
| | | CAGTACAGCGCCGACGGCTCACCGGCGGCGCCGCGCGGCCACGGGCGGCGAGGCGACAAGTTCGCGTT | PAAPRGHGRRGDKFAFLDDFGHV |
| | | CCTGGACGACTTCGGCCACGTCGACGTGAGCTACTCCACGGAGGACGAGCAGCCGCTGCACGTGTCGA | DVSYSTEDEQPLHVSRNSSFNTV |
| | | GGAACTCGTCGTTCAACACCGTCGACGAGATGGCGGCGGCGGCGACGGCGCCGCCGCAGCAGCAGCAT | DEMAAAATAPPQQQHGSSLHRLM |
| | | GGCTCCAGCCTGCACCGGCTGATGGGGTACGGCTCGGCGAGCGACCTGCTGTTCCGGCAGCACTCGCC | GYGSASDLLFRQHSPDLYESFSE |
| | | TGACCTGTACGAGAGCTTCTCCGAGAGGACGACGCCGGAGGCCGCCGCGCTGTACGACCGGAAAGGGA | RTTPEAAALYDRKGKGVCVDLDD |
| | | AAGGCGTCTGCGTCGACCTCGACGACGACGGCGGCGACGATGACTCAGACGAGGATTGCAGCGGCGCG | DGGDDDSDEDCSGALKRSRLRGS |
| | | CTGAAGAGGTCGAGGCTGAGAGGGTCCGGTTGGCCATTGCCGGGGATACTCAACAGCAAGGGGACGCC | GWPLPGILNSKGTPGMGAIRIKS |
| | | TGGAATGGGAGCAATCAGGATCAAGTCATAG SEQ ID NO: 33 | * SEQ ID NO: 34 |
| 18 | Xa21_protkinase | ATGGAATTAGTAGAAGTGGAGTGGCACGGGGAAGACATAAGCAGGCAATTAAGAGTGCGCCGCCTGAA | MELVEVEWHGEDISRQLRVRRLN |
| | | TGCTGGCTTTCTAAGCATCGACTGCGGCCTAGAGGACACCAGCGGCTACAAGGAAGACAAGACTGGCA | AGFLSIDCGLEDTSGYKEDKTGI |
| | | TCATCTACGTCTCCGACGGCTCCTACGTCGATGCCGGGGAGAACCACCGTGTGTCGGCGGAGGAAGAG | IYVSDGSYVDAGENHRVSAEEEN |
| | | AACGCGAAATTGCCACGTCCGTACGCGACGCTCCGGAGCTTCCCTTCCGGCATGCGGAATTGCTACAC | AKLPRPYATLRSFPSGMRNCYTL |
| | | GCTGCCCGCGGACGCTGGGGCCAAGTACCTTGTCCGGGTGGTGTCCTTCTACGGCAACTACGACGGGA | PADAGAKYLVRVVSFYGNYDGKN |
| | | AGAACAGCTCATCGTCGTTGCAGTTCGACCTGCACCTCGGGACAAACTACTGGGCCACTGTCCGCGCT | SSSSLQFDLHLGTNYWATVRADG |
| | | GACGGCAACAACGTGTACGAGGCGCTGTTCGTGGCCTGGGCGAGCTGGGTGCCGGTGTGTCTCGTGAA | NNVYEALFVAWASWVPVCLVNTG |
| | | CACCGGCCGTGGCACGCCGTTCGTGTCCGCGGTGGAGCTGAGGCAGCTCAGCGGCGAGCTCTACCCGG | RGTPFVSAVELRQLSGELYPGLN |
| | | GCCTCAATGCCAGCCAGTCCTTGTCCATGTATGGACGGCGCAACATGGGTTCAAACATTTCATATACA | ASQSLSMYGRRNMGSNISYTRYP |
| | | CGTTACCCCCACGATCGATATGACCGGTACTGGTGGCAGGTATGGTCTGATCCAATGTGGAAGAACAT | HDRYDRYWWQVWSDPMWKNISTP |
| | | TTCCACTCCATCAACCATCGAACAGAGCTCCATCTTCGCTTTGCCCCTCCCCGTTATCCAGACCGCAG | STIEQSSIFALPLPVIQTAVETV |
| | | TTGAGACGGTCAGCAATAAGACAATGCTCAACATTACATGGCAAGCGGAAACACCCCGAGGCTTTTTG | SNKTMLNITWQAETPRGFLVFLH |
| | | GTTTTCTTGCACTTCGCCGACTTCCAGAACAGTCAATTCCGACAGTTCAAGGTCGCTTTTAACAATGA | FADFQNSQFRQFKVAFNNDYRDN |
| | | CTATCGTGATAACTATAGCCCACCATACATGACCACAGATGCCTTGTTTGGCTTGACAAGGGCCACCA | YSPPYMTTDALFGLTRATSGMYS |
| | | GTGGCATGTACAGCATCAGTATTGGAGCCACCGATGCATCTAAGCTGCCGCCGATGCTAAACGCGATT | ISIGATDASKLPPMLNAIEAYTL |
| | | GAGGCATACACTCTCATGTCCCGTGACAACCCAATAACGTTCCCAAACGATTTTGACACTATCATGGC | MSRDNPITFPNDFDTIMAIKHEY |
| | | AATTAAACATGAATACGGGATAAAGAAGAATTGGATGGGTGATCCATGTTTCCCAACACAATTTGCAT | GIKKNWMGDPCFPTQFAWDGVKC |
| | | GGGATGGCGTGAAATGCAACAATGCAAGTGGTAACAATACGAGGATAATATATTTGGATCTCTCGAAC | NNASGNNTRIIYLDLSNNNLHGP |
| | | AACAACTTGCATGGGCCGATATCTAATAACTTTACATTGCTCACGGCACTCAAGTACCTGAATTTGTC | ISNNFTLLTALKYLNLSGNQLNA |
| | | GGGCAACCAGCTGAATGCACCCATTCCTAAGTCCCTCTGTGAAAACAATAATACAGGATCATTGATTC | PIPKSLCENNNTGSLILSFDSDR |
| | | TCAGTTTCGATTCTGACCGAGAAACGTGCACAATAATACCGCCTCCAACAATAAAAAAATTGAACAAA | ETCTIIPPPTIKKLNKAILAISV |
| | | GCAATCTTAGCTATTTCGGTAGTGGTTCCTGTGATGGCCATTGCTATTCTTGTTCTCGCTTATTTGAT | VVPVMAIAILVLAYLIWRQKRKP |
| | | CTGGAGACAGAAAAGAAAACCAAACATATCAATAGATGATACTCCGAGAGAACGACAAGCTGAAAATG | NISIDDTPRERQAENVPASRKNH |
| | | TTCCAGCAAGCAGAAAAAACCATGGGAATGCCTTGCTAATGGTTGAGAATCGCCAATTCACATACAAG | GNALLMVENRQFTYKELEKLTNK |
| | | GAGCTTGAGAAGTTAACTAATAAGTTTGAACGCTTCATTGGACAAGGAGGTTTTGGACTCGTGTACTA | FERFIGQGGFGLVYYGLIEDGIE |
| | | CGGACTTATAGAAGATGGTATTGAGGTTGCTGTCAAGATACGTTCTGAGTCATCGTGTCATGGACTCG | VAVKIRSESSCHGLDEFFAEVQS |
| | | ATGAATTTTTCGCTGAGGTTCAAAGTTTGACAAAGGTGCATCACAGAAATCTAGTTTCCTTGGTTGGT | LTKVHHRNLVSLVGYCWEKNHLA |
| | | TACTGCTGGGAGAAGAATCATTTAGCACTAGTTTATGAGTACATGGCTCGAGGCACTCTTTGTGATCA | LVYEYMARGTLCDHLRGNHGFSE |
| | | TCTGAGAGGTAATCATGGTTTTAGTGAAACCTTGAATTGGAAAACACGAGTCCGAGTTTTGGTTGAAG | TLNWKTRVRVLVEAAQGLDYLHK |
| | | CTGCACAAGGACTGGATTATCTGCATAAAGGTTGTAGTCCGCCAATAATTCACGGAGATGTGAAGACG | GCSPPIIHGDVKTSNILLDQNLQ |
| | | AGTAACATTCTGTTGGATCAAAATTTACAAGCTAAAATTGCAGATTTTGGTCTTTCCAAGACATATCT | AKIADFGLSKTYLSDTQTHISVN |
| | | TAGCGACACACAGACGCACATATCAGTCAATCCAGCTGGGTCAGCTGGTTATATGGACCCTGGGTACT | PAGSAGYMDPGYFHTGRLTESCD |
| | | TTCACACAGGCAGACTCACGGAGAGTTGTGATGTTTATAGTTTTGGAATTGTTCTGTTAGAGATAGCC | VYSFGIVLLEIATGESPILPGQD |
| | | ACCGGCGAGTCTCCCATACTACCAGGTCAAGACCACATTATTCAGCGTGTGAATAAGAAGATTGCTAC | HIIQRVNKKIATGNISLVADARL |
| | | CGGTAATATCAGCTTGGTTGCTGATGCACGACTCAGAGGTGCCTATGATATCAGCTCAATGTGGAAGG | RGAYDISSMWKVVDIGLLCTTDT |
| | | TGGTGGACATCGGACTGTTATGCACTACTGACACTGGTGCAAAAAGGCCGACAATGGCTGCTGTGGTT | GAKRPTMAAVVVRLNESLALEEA |
| | | GTGCGACTCAATGAGAGCCTTGCATTGGAGGAAGCTCATTGCGAGAGTGGCTTCAGGGGAAGCACAGG | HCESGFRGSTGTSCDTTVSTSTF |
| | | CACATCGTGTGATACCACAGTTTCAACATCTACGTTTGGGCCTTCAGCAAGATGA | GPSAR* |
| | | SEQ ID NO: 35 | SEQ ID NO: 36 |
| 19 | Xa21_Os07g0190000 | ATGGCGCTCCAGGCATCGTCGTCGCCGTCCTTGTTCCGCGCGATCCCGACGAACACCAACGCTTCTTG | MALQASSSPSLFRAIPTNTNASC |
| | | CCGGCGAAAGTTTCAGGTCAGGGCGAGCGCGGCGGCGGCGGCGGCGAACGGCGGCGGGGATGGGAAGG | RRKFQVRASAAAAAANGGGDGKV |
| | | TGATGATGAGGAAGGAGGCGGCGTCGGGCGCGTGGAAGATCGACTACTCCGGCGAGAAGCCGGCGACG | MMRKEAASGAWKIDYSGEKPATP |
| | | CCTCTGCTTGACACGGTGAACTACCCGGTCCACATGAAGAACCTCTCGACGCCGGAGCTGGAGCAGCT | LLDTVNYPVHMKNLSTPELEQLA |
| | | GGCGGCAGAGCTCCGGGCGGAGATCGTGCACACGGTGTCCAAGACGGGGGGCCACCTGAGCTCCAGCC | AELRAEIVHTVSKTGGHLSSSLG |
| | | TGGGCGTCGTCGAGCTCGCCGTGGCGCTGCACCATGTGTTCGACACGCCGGAGGACAAGATCATCTGG | VVELAVALHHVFDTPEDKIIWDV |
| | | GACGTCGGGCACCAGGCGTACCCGCACAAGATCCTGACGGGGCGGCGTTCGCGGATGCACACCATCCG | GHQAYPHKILTGRRSRMHTIRQT |
| | | GCAGACCTCCGGGCTCGCCGGGTTCCCGAAGCGCGACGAGAGCGCGCACGACGCGTTCGGCGCGGGCC | SGLAGFPKRDESAHDAFGAGHSS |
| | | ACAGCTCGACGAGCATCTCGGCGGCGCTCGGGATGGCAGTGGCGAGGGACCTCCTCGGGAAGAAGAAC | TSISAALGMAVARDLLGKKNHVI |
| | | CACGTCATCTCGGTGATCGGAGACGGCGCCATGACCGCCGGCCAGGCGTACGAGGCGATGAACAACTC | SVIGDGAMTAGQAYEAMNNSGYL |
| | | GGGCTACCTCGACTCCAACATGATCGTGGTGCTCAACGACAACAAGCAGGTGTCCCTCCCGACGGCGA | DSNMIVVLNDNKQVSLPTATLDG |
| | | CGCTCGACGGCCCCGCCACGCCCGTCGGCGCGCTGAGCAAGGCGCTGACGAAGCTCCAGTCGAGCACC | PATPVGALSKALTKLQSSTKLRR |
| | | AAGCTCCGCCGCCTCCGCGAGGCTGCGAAGACGGTGACGAAGCAGATCGGCGGGCAGGCGCACGAGGT | LREAAKTVTKQIGGQAHEVAAKV |
| | | GGCGGCGAAGGTGGACGAGTACGCGCGCGGCATGGTGAGCGCGTCGGGCTCGACGCTGTTCGAGGAGC | DEYARGMVSASGSTLFEELGLYY |
| | | TCGGGCTCTACTACATCGGCCCCGTCGACGGCCACAACGTCGACGACCTCGTCGCCATCTTCAACAAG | IGPVDGHNVDDLVAIFNKVKSMP |
| | | GTGAAGTCGATGCCGGCGCCGGGGCCGGTGCTCGTCCACATCGTGACGGAGAAGGGGAAGGGCTACCC | APGPVLVHIVTEKGKGYPPAEAA |
| | | GCCGGCGGAGGCCGCCGCCGACCGGATGCACGGCGTGGTCAAGTTCGACCCGACGACGGGGAAGCAGT | ADRMHGVVKFDPTTGKQFKSKCS |
| | | TCAAGTCCAAGTGTTCGACGCTGTCCTACACCCAGTACTTCGCCGAGGCGTTGATCCGGGAGGCCGAG | TLSYTQYFAEALIREAEADDKVV |
| | | GCCGACGACAAGGTGGTCGGCATCCACGCCGCCATGGGCGGCGGCACGGGGCTCAACTACTTCCACAA | GIHAAMGGGTGLNYFHKRFPERC |
| | | GAGGTTCCCGGAGCGGTGCTTCGACGTGGGGATCGCGGAGCAGCACGCCGTGACGTTCGCCGCGGGGC | FDVGIAEQHAVTFAAGLAAEGLK |
| | | TCGCCGCCGAGGGGCTCAAGCCATTCTGCGCCATCTACTCGTCGTTCCTGCAGCGCGGGTACGACCAG | PFCAIYSSFLQRGYDQVVHDVDL |
| | | GTGGTGCACGACGTCGACCTGCAGCGGCTGCCGGTGAGGTTCGCCATGGACAGGGCGGGGCTCGTCGG | QRLPVRFAMDRAGLVGADGPTHC |
| | | CGCCGACGGGCCCACGCACTGCGGCGCGTTCGACGTCGCCTACATGGCGTGCCTCCCGAACATGGTCG | GAFDVAYMACLPNMVVMAPADEA |
| | | TCATGGCGCCCGCCGACGAGGCCGAGCTCATGCACATGGTCGCCACCGCCGCCGCCATCGACGACCGC | ELMHMVATAAAIDDRPSCFRFPR |
| | | CCTAGCTGCTTCCGCTTCCCCCGCGGCAATGGCATTGGCGCCGTCCTCCCTCCCAACCACAAGGGCAC | GNGIGAVLPPNHKGTPLEVGKGR |
| | | ACCTCTCGAGGTCGGGAAGGGGAGGGTGCTCGTAGGAGGGAACAGGGTGGCGCTGCTAGGGTACGGCA | VLVGGNRVALLGYGTMVQACMKA |
| | | CGATGGTGCAGGCATGCATGAAGGCGGCAGAGGCGCTGAAGGAGCACGGCATCTACGTCACCGTCGCC | AEALKEHGIYVTVADARFCKPLD |
| | | GACGCGCGTTTCTGCAAGCCGCTCGACACAGGGCTTATCCGGGAGCTCGCCGCCGAGCACGAGGTCCT | TGLIRELAAEHEVLVTVEEGSIG |
| | | CGTCACTGTGGAGGAGGGCTCCATCGGAGGGTTCGGTTCCCACGTCGCCCACTACCTCAGCCTCAGCG | GFGSHVAHYLSLSGLLDGPLKLR |
| | | GCCTCCTTGATGGCCCCCTCAAGTTGAGGTCCATGTTCTTGCCAGACAGGTACATAGACCATGGTGCA | SMFLPDRYIDHGAPVDQLEEAGL |
| | | CCAGTAGACCAGCTTGAGGAGGCAGGATTGACACCAAGGCACATTGCTGCCACTGTGCTGTCCTTGCT | TPRHIAATVLSLLGRPLEALQLS |
| | | TGGGAGGCCATTGGAGGCACTTCAGCTCAGCTGA SEQ ID NO: 37 | * SEQ ID NO: 38 |
| 20 | Xa21_Os03g0109400 | ATGGCTGCGGCAGTGGCAATGCGAGGGAGTAGCAGTGATGGAGGTGGCTATGATAAGGTTTCCGGGAT | MAAAVAMRGSSSDGGGYDKVSGM |
| | | GGACTCCGGTAAATATGTGCGCTACACGCCTGAGCAGGTGGAGGCGCTTGAGCGGGTGTACGCCGATT | DSGKYVRYTPEQVEALERVYADC |
| | | GCCCCAAGCCAACCTCCTCCCGCAGGCAGCAACTGCTGCGTGAGTGCCCCATACTTGCTAACATCGAG | PKPTSSRRQQLLRECPILANIEP |
| | | CCGAAGCAGATCAAGGTCTGGTTCCAGAACAGAAGGTGCCGGGATAAGCAGCGGAAGGAGTCTTCACG | KQIKVWFQNRRCRDKQRKESSRL |
| | | GCTTCAGGCTGTCAACAGGAAATTGACGGCAATGAACAAGCTTCTTATGGAAGAGAATGAACGACTCC | QAVNRKLTAMNKLLMEENERLQK |
| | | AGAAGCAGGTCTCCCAATTGGTTCATGAGAATGCCCACATGCGACAGCAGCTGCAGAATACTCCGCTG | QVSQLVHENAHMRQQLQNTPLAN |
| | | GCAAATGATACAAGCTGTGAATCAAATGTGACTACCCCTCAAAACCCTTTAAGGGATGCAAGTAACCC | DTSCESNVTTPQNPLRDASNPSG |
| | | CTCTGGGCTCCTTTCAATTGCAGAGGAGACCTTGACAGAGTTCCTCTCAAAGGCTACTGGTACAGCTA | LLSIAEETLTEFLSKATGTAIDW |
| | | TTGATTGGGTCCAGATGCCTGGGATGAAGCCTGGTCCGGATTCGGTTGGTATTGTGGCCATTTCACAT | VQMPGMKPGPDSVGIVAISHGCR |
| | | GGTTGCCGTGGTGTTGCTGCCCGTGCCTGTGGTTTGGTGAACCTAGAACCAACAAAAGTGGTAGAGAT | GVAARACGLVNLEPTKVVEILKD |
| | | ATTGAAAGATCGTCCATCTTGGTTCCGTGATTGTCGAAACCTGGAAGTCTTTACAATGATTCCAGCAG | RPSWFRDCRNLEVFTMIPAGNGG |
| | | GAAATGGAGGAACGGTTGAACTTGTCTACACACAGTTGTATGCTCCAACAACTTTAGTTCCTGCACGA | TVELVYTQLYAPTTLVPARDFWT |
| | | GATTTTTGGACGATACGGTACACAACCACAATGGAAGATGGCAGTCTTGTGGTCTGTGAGAGATCTTT | IRYTTTMEDGSLVVCERSLSGSG |
| | | AAGTGGTTCAGGGGGCGGTCCAAGTGCTGCCTCTGCTCAGCAATATGTGAGAGCGGAAATGCTTCCAA | GGPSAASAQQYVRAEMLPSGYLV |
| | | GTGGATACCTGGTTCGCCCATGTGAAGGTGGGGGATCAATTGTGCACATAGTGGACCATCTGGATCTT | RPCEGGGSIVHIVDHLDLEAWSV |
| | | GAGGCATGGAGTGTTCCTGAGGTGCTTCGGCCACTCTATGAATCTTCAAGGGTAGTCGCTCAGAAAAT | PEVLRPLYESSRVVAQKMTTAAL |
| | | GACTACTGCGGCACTCCGGCACATCAGACAAATTGCTCAAGAAACAAGTGGGGAAGTGGTGTATGCCT | RHIRQIAQETSGEVVYALGRQPA |
| | | TGGGGAGGCAACCAGCAGTGCTACGGACTTTTAGTCAAAGGCTGAGCAGAGGCTTTAACGATGCCATT | VLRTFSQRLSRGFNDAISGFNDD |
| | | AGTGGTTTCAATGATGATGGGTGGTCTATAATGGGCGGAGACGGTGTTGAAGATGTAGTTATTGCTTG | GWSIMGGDGVEDVVIACNSTKKI |
| | | CAACTCAACTAAGAAAATTAGGAGTAGCAGCAATGCTGGCATCGCCTTTGGAGCCCCCGGAGGTATTA | RSSSNAGIAFGAPGGIICAKASM |
| | | TATGTGCTAAGGCATCAATGTTACTGCAGAGTGTTCCTCCAGCAGTACTGGTTCGATTTCTGAGGGAG | LLQSVPPAVLVRFLREHRSEWAD |
| | | CATAGATCTGAATGGGCCGATTACAATATTGATGCATATTTGGCTTCAACTCTGAAAACAAGTGCATG | YNIDAYLASTLKTSACSLPGLRP |
| | | TTCACTTCCTGGGTTGCGACCCATGAGATTTTCTGGGAGCCAAATCATCATTCCACTTGCTCACACAG | MRFSGSQIIIPLAHTVENEEILE |
| | | TCGAGAATGAGGAGATTCTTGAAGTTGTTCGCCTTGAGGGTCAACCTCTTACTCATGATGAAGCTCTT | VVRLEGQPLTHDEALLSRDIHLL |
| | | CTTTCAAGGGATATCCACCTGCTTCAGCTCTGCACTGGAATAGACGAGAAGTCTGTGGGATCCTCCTT | QLCTGIDEKSVGSSFQLVFAPID |
| | | TCAGCTTGTCTTTGCACCGATTGATGATTTCCCAGATGAAACTCCATTGATTTCTTCTGGCTTCCGTG | DFPDETPLISSGFRVIPLDMKTD |
| | | TTATACCACTTGATATGAAAACAGATGGTGCATCCTCTGGTAGGACATTAGATTTGGCATCTAGTCTT | GASSGRTLDLASSLEVGSATAQA |
| | | GAAGTAGGTTCAGCAACAGCTCAAGCCTCCGGAGATGCATCTGCAGATGATTGTAACTTGCGATCTGT | SGDASADDCNLRSVLTIAFQFPY |
| | | TCTGACGATCGCTTTTCAATTCCCTTATGAGTTGCATCTCCAAGACAGTGTTGCAGCTATGGCTCGCC | ELHLQDSVAAMARQYVRSIVSAV |
| | | AATATGTCCGTAGCATTGTTTCTGCTGTGCAAAGAGTGTCAATGGCTATCTCTCCCTCTCAAACTGGT | QRVSMAISPSQTGLNAGQRIISG |
| | | CTAAATGCCGGACAGAGGATAATCTCTGGTTTCCCTGAAGCAGCAACCCTTGCTCGATGGGTTTGCCA | FPEAATLARWVCQSYHYHLGVEL |
| | | GAGCTACCATTACCATCTAGGGGTAGAGTTACTTAGTCAATCAGATGGAGATGCAGAACAATTGTTGA | LSQSDGDAEQLLKMLWHYQDAIL |
| | | AGATGCTATGGCATTACCAAGATGCTATTTTGTGCTGCTCATTCAAGGAAAAACCGGTGTTTACATTT | CCSFKEKPVFTFANKAGLDMLET |
| | | GCCAACAAAGCAGGACTGGACATGCTAGAAACTTCCCTTGTCGCCTTACAGGACCTCACATTGGACAG | SLVALQDLTLDRIFDEPGKEALF |
| | | GATCTTTGATGAGCCTGGAAAAGAAGCATTGTTCTCAAACATTCCCAAATTGATGGAACAGGGCCATG | SNIPKLMEQGHVYLPSGVCMSGM |
| | | TCTACCTGCCATCAGGCGTGTGCATGTCAGGAATGGGTCGGCATGTTTCTTTCGATCAGGCCGTGGCT | GRHVSFDQAVAWKVLAEDSNVHC |
| | | TGGAAAGTGCTTGCCGAGGATAGTAATGTCCACTGCCTGGCCTTCTGTTTCGTCAACTGGTCCTTTGT | LAFCFVNWSFV* |
| | | GTGA SEQ ID NO: 39 | SEQ ID NO: 40 |
| 21 | Xa21_Os01g0184100 | ATGGAGAGCGCCATGTTCGGGCTGGAGACGCCGCTGATGACGGCGCTGCAGCACCTGCTCGACATCCC | MESAMFGLETPLMTALQHLLDIP |
| | | CGACGGCGAGGGCGGCGCCGCCGGGAAGCAGGGCGCGACCGGTGGCCCCACGCGTGCGTACGTGCGCG | DGEGGAAGKQGATGGPTRAYVRD |
| | | ACGCGCGGGCCATGGCGGCGACCCCCGCCGACGTGAAGGATCTCCCCGGCGCGTACGCGTTCGTGGTG | ARAMAATPADVKDLPGAYAFVVD |
| | | GACATGCCTGGGCTCAAGTCCTCCGACATCAAGGTGCAGGTGGAGGAGGAGAGGGTGCTGGTGATCAG | MPGLKSSDIKVQVEEERVLVISG |
| | | CGGCGAGCGGCGGCGCGGCGGCGGGGAGGAGGAGAAGGAGGAGTCGTGCAAGTACCTGCGGATGGAGC | ERRRGGGEEEKEESCKYLRMERR |
| | | GGCGGATGGGCAAGTTCATGCGCAAGTTCGTGCTCCCCGACAACGCCGACGTCGACAAGATCTCCGCC | MGKFMRKFVLPDNADVDKISAVC |
| | | GTGTGCCAGGACGGCGTGCTCACCGTCACCGTCGAGAAGCTCCCGCCGCCGGAGCCCAAGAAGCCCAA | QDGVLTVTVEKLPPPEPKKPKTI |
| | | GACCATCGAGGTCAAGGTCGCGTGA | EVKVA* |
| | | SEQ ID NO: 41 | SEQ ID NO: 42 |
| 22 | Xa21_Os11g0703900 | ATGGCGGGCAAGGGCGAGGGTCCGGCCATCGGCATCGACCTGGGCACGACCTACTCGTGCGTGGGCGT | MAGKGEGPAIGIDLGTTYSCVGV |
| | | GTGGCAGCATGACCGCGTGGAGATCATCGCCAACGACCAGGGCAACCGCACCACCCCCTCCTACGTCG | WQHDRVEIIANDQGNRTTPSYVG |
| | | GCTTCACCGACTCCGAGAGGCTCATCGGAGATGCTGCCAAGAACCAGGTCGCCATGAACCCCATCAAC | FTDSERLIGDAAKNQVAMNPINT |
| | | ACCGTCTTCGATGCCAAGCGTCTCATTGGCAGGAGGTTTAGCGATGCTTCTGTTCAGAGTGACATTAA | VFDAKRLIGRRFSDASVQSDIKL |
| | | GCTCTGGCCCTTCAAGGTGATTGCTGGACCTGGTGACAAGCCTATGATTGTTGTCCAGTACAAGGGTG | WPFKVIAGPGDKPMIVVQYKGEE |
| | | AGGAGAAGCAGTTTGCTGCTGAAGAGATCTCCTCCATGGTCCTCATCAAGATGCGTGAGATTGCTGAG | KQFAAEEISSMVLIKMREIAEAY |
| | | GCCTACCTTGGCACCACCATCAAGAATGCCGTTGTCACTGTTCCTGCCTACTTCAATGACTCCCAGAG | LGTTIKNAVVTVPAYFNDSQRQA |
| | | GCAGGCCACCAAGGATGCTGGAGTGATTGCTGGTCTCAATGTCATGCGTATCATCAACGAGCCGACTG | TKDAGVIAGLNVMRIINEPTAAA |
| | | CTGCAGCTATTGCCTATGGTCTTGACAAGAAGGCCACCAGCGTTGGTGAGAAGAATGTCCTCATCTTT | IAYGLDKKATSVGEKNVLIFDLG |
| | | GACCTTGGAGGTGGTACCTTTGATGTTTCCCTCCTTACCATTGAGGAGGGTATCTTTGAGGTCAAGGC | GGTFDVSLLTIEEGIFEVKATAG |
| | | CACAGCTGGTGACACCCATCTTGGTGGTGAAGATTTTGACAACCGCATGGTCAACCACTTTGTGCAAG | DTHLGGEDFDNRMVNHFVQEFKR |
| | | AATTCAAGAGGAAGAACAAGAAGGATATCACTGGCAACCCCAGGGCTCTCAGGAGGTTGAGGACAGCT | KNKKDITGNPRALRRLRTACERA |
| | | TGTGAGAGGGCGAAGAGGACACTGTCCTCCACTGCCCAGACCACCATTGAGATCGATTCCCTGTATGA | KRTLSSTAQTTIEIDSLYEGIDF |
| | | GGGCATTGACTTCTACTCAACCATCACCCGTGCCAGGTTTGAGGAGCTCAACATGGATCTCTTCAGGA | YSTITRARFEELNMDLFRKCMEP |
| | | AGTGTATGGAGCCTGTGGAGAAGTGCCTCAGGGATGCTAAGATGGACAAGAGCTCTGTTCATGATGTT | VEKCLRDAKMDKSSVHDVVLVGG |
| | | GTCCTTGTTGGTGGCTCCACTAGGATCCCGAGGGTGCAGCAGCTCCTGCAGGATTTCTTCAACGGCAA | STRIPRVQQLLQDFFNGKELCKN |
| | | GGAGCTTTGCAAGAACATCAACCCAGATGAGGCTGTTGCTTATGGTGCTGCTGTCCAGGCTGCCATCT | INPDEAVAYGAAVQAAILSGEGN |
| | | TGAGTGGTGAGGGCAACGAGAAGGTCCAGGACCTCCTCCTGTTGGATGTCACCCCTCTCTCTCTCGGT | EKVQDLLLLDVTPLSLGLETAGG |
| | | TTGGAGACTGCTGGTGGTGTCATGACCGTCTTGATCCCAAGGAACACCACCATTCCCACCAAGAAGGA | VMTVLIPRNTTIPTKKEQVFSTY |
| | | GCAGGTCTTCTCCACCTACTCTGACAACCAGCCTGGTGTGCTCATCCAGGTTTATGAGGGTGAGAGGA | SDNQPGVLIQVYEGERTRTRDNN |
| | | CCAGGACACGTGACAACAACCTGCTGGGCAAGTTTGAGCTCTCTGGAATCCCTCCTGCTCCCAGGGGT | LLGKFELSGIPPAPRGVPQITVC |
| | | GTTCCACAGATCACTGTTTGCTTCGACATTGATGCCAATGGTATCCTGAACGTGTCTGCTGAGGACAA | FDIDANGILNVSAEDKTTGQKNK |
| | | GACCACCGGGCAGAAGAACAAGATCACCATCACCAACGACAAGGGCAGGCTCAGCAAGGAGGAGATTG | ITITNDKGRLSKEEIEKMVQEAE |
| | | AGAAGATGGTCCAGGAGGCCGAGAAGTACAAGTCAGAGGATGAGGAGCACAAGAAGAAGGTGGAGTCC | KYKSEDEEHKKKVESKNALENYA |
| | | AAGAACGCGCTGGAGAACTACGCCTACAACATGCGCAACACCATCAAGGACGAGAAGATCGCCTCGAA | YNMRNTIKDEKIASKLPAADKKK |
| | | GCTACCGGCAGCGGACAAGAAGAAGATCGAGGATGCCATCGACCAGGCCATCCAGTGGCTGGACGGCA | IEDAIDQAIQWLDGNQLAEADEF |
| | | ACCAGCTCGCTGAGGCTGATGAGTTCGATGACAAGATGAAGGAGCTGGAGGGCATCTGCAACCCCATC | DDKMKELEGICNPIIAKMYQGAG |
| | | ATCGCCAAGATGTACCAGGGCGCTGGCGCGGACATGGCCGGCGGCATGGACGAGGACGATGCTCCCCC | ADMAGGMDEDDAPPAGGSGAGPK |
| | | GGCTGGCGGCAGCGGTGCTGGCCCCAAGATCGAGGAGGTCGACTAA | IEEVD* |
| | | SEQ ID NO: 43 | SEQ ID NO: 44 |
| 23 | Xa21_OsI_34361 | ATGGCAGCGGCGGCGGCGAGGTACGACGTGGAGAAGGGAGGGAGGAAGAGGGAGGGGGAGGAGGAGAG | MAAAAARYDVEKGGRKREGEEER |
| | | GTACGGTTCGCCGGCGGCGGTGGCGCAGTACCCGCAGCGGGAGGGGGAGAGGGAGTGGGTGCCGTGGC | YGSPAAVAQYPQREGEREWVPWL |
| | | TCGTGCCGGCCATCCTCGTCGCCAACGTCGTCGTCTTCGCCGTCGCCATGTACGTCAACAACTGCCCC | VPAILVANVVVFAVAMYVNNCPS |
| | | AGCTCCCACGCCTCTCGCGGCCGCCGAGGCGGCGCGTGCGTCGCCGGATTCCTCCGCCGCTTCTCCTT | SHASRGRRGGACVAGFLRRFSFQ |
| | | CCAGCCTCTCTCCGAGAACCCGCTCCTCGGCCCCTCCTCCGCCACATTGCAGAAGATGGGAGCACTGG | PLSENPLLGPSSATLQKMGALVW |
| | | TATGGGACAAGGTTGTTCATGAGCATCAGGGATGGAGGCTAGTGACCTGCATCTGGCTGCACGCTGGT | DKVVHEHQGWRLVTCIWLHAGVV |
| | | GTTGTTCATCTGCTTGCCAACATGCTGAGCCTCGTGCTCATCGGACTCAGGCTCGAGCAGCAGTTTGG | HLLANMLSLVLIGLRLEQQFGYM |
| | | ATACATGAGAATTGGCATCATCTACCTTGTTTCTGGCATTGGAGGCAGCGTTCTTTCATCTCTGTTCA | RIGIIYLVSGIGGSVLSSLFIRN |
| | | TCAGAAACAGCATCTCCGTCGGTGCTTCTGGCGCTCTCTTTGGTCTTCTTGGAGCCATGCTGTCAGAG | SISVGASGALFGLLGAMLSELFT |
| | | CTTTTCACCAACTGGACCATATACACGAACAAGGCTGCAGCTCTAGTGACGCTCTTGATCGTCATCGC | NWTIYTNKAAALVTLLIVIAINL |
| | | GATCAACCTCGCCATCGGCATCCTCCCTCACGTCGACAACTTCGCCCACATCGGAGGGTTCTTGACTG | AIGILPHVDNFAHIGGFLTGFLL |
| | | GGTTCCTCCTCGGATTCATCTTCCTGATGCGCCCACACTACGGATGGATGCAGCGATATGTCCTGCCT | GFIFLMRPHYGWMQRYVLPSSVK |
| | | TCCTCTGTCAAGTACACCTCCAAGAAGTACCTGGCTTATCAATGGATCTTGCTGGCCATGGCCTCGGT | YTSKKYLAYQWILLAMASVLAVI |
| | | CCTAGCTGTCATCGGATTCGCCGTTGGGCTGTCGATGCTCTTCAGAGGGGTGAATGCTAATGAACGCT | GFAVGLSMLFRGVNANERCHWCH |
| | | GCCATTGGTGCCACTACCTGAGCTGCATTCCTACCTCGAGATGGACCTGCGGGAACTGA | YLSCIPTSRWTCGN* |
| | | SEQ ID NO: 45 | SEQ ID NO: 46 |
| 24 | Xa21_OsI_09185 | ATGGCCGACGGGGGAGAGAAGTGCCGGGACGCGGCCGGCGAGGGCGGCGGCGGCGGCGACCTGTACGC | MADGGEKCRDAAGEGGGGGDLYA |
| | | CGTGCTCGGGCTCAAGAAGGAGTGCTCCGACGCCGACCTCAAGCTCGCGTACCGGAAGCTCGCCATGA | VLGLKKECSDADLKLAYRKLAMR |
| | | GATGGCATCCGGACAAATGCTCATCCTCCAGCAGTGCAAAGCACATGGAGGAAGCCAAGGAGAAGTTC | WHPDKCSSSSSAKHMEEAKEKFQ |
| | | CAGGAGATCCAGGGCGCCTATTCCGTCCTCTCAGACTCAAACAAGCGGTTCCTCTACGACGTGGGGGT | EIQGAYSVLSDSNKRFLYDVGVY |
| | | ATATGATGATGACAACAATGACGATGACAACCTGCAGGGGATGGGGGACTTCATTGGTGAGATGGCCC | DDDNNDDDNLQGMGDFIGEMAQM |
| | | AGATGATGAGCCAGGCACGGCCAACGAGGCAGGAGAGCTTTGAAGAACTGCAGCAGCTATTCGTAGAC | MSQARPTRQESFEELQQLFVDMF |
| | | ATGTTCCAAGCTGATCTTGATTCGGGTTTCTGCAATGGACCCTCAAAGTGCTACCATACCCAGGCCCA | QADLDSGFCNGPSKCYHTQAQSQ |
| | | AAGCCAGACTCGAACATCCTCAACCTCCCCTTCGACGTCACCGTCTCCACCGCCTCCAGTAGCTACTG | TRTSSTSPSTSPSPPPPVATEAE |
| | | AGGCAGAATCGCCATCATGTAATGGTATTAATAAGCGTGGTTCATCAGCAATGGACTCTGGGAAGCCT | SPSCNGINKRGSSAMDSGKPPRA |
| | | CCAAGAGCCAGCGAAGTCGGTGCTGGACAGAGTCAATCAGGGTTTTGTTTCGGGCAGAAGAGTGATGC | SEVGAGQSQSGFCFGQKSDAKQA |
| | | TAAACAAGCGGCGAAGACGCGAAGCGGGAACACGGCCAGCCGGAGGAGGAACGGCCGGAAGCAGAAGG | AKTRSGNTASRRRNGRKQKVSSK |
| | | TGTCGTCGAAGCACGACGTCTCGTCTGAGGACGAGATGCCAGGTCACCCTTACACTGTTAAAGCTAAA | HDVSSEDEMPGHPYTVKAKN* |
| | | AACTAA SEQ ID NO: 47 | SEQ ID NO: 48 |
| 25 | Xa21_Os06g0682900 | ATGGCGATGCGGCGGTGGAGAGAGGATGCGGTGGCGCTGTCGCTGCGCGGGTGCGGGTTCGGCGACGG | MAMRRWREDAVALSLRGCGFGDG |
| | | GGACGACGACCGGCCGGAGAAGCCGCGGCGGTACGGGGTGACGGAGATGAGGAGCCCCTTGTACGCCT | DDDRPEKPRRYGVTEMRSPLYAF |
| | | TCCGCCCCGCCCACCACGCGCTCCAGGAAATATTGGATTCCCTAGGTCCTTTTGTTGATGGTTTGAAG | RPAHHALQEILDSLGPFVDGLKF |
| | | TTTACTGGTGGATCTCATAGTTTGATGGGAAAAGAACTGGTTAGAGAGATTACCGATTTAGCACACAA | TGGSHSLMGKELVREITDLAHKH |
| | | GCATGACATATATGTGAGTACAGGAGATTGGGCAGAGCATCTTCTGCATCAAGGACCTTCTTTTTTCA | DIYVSTGDWAEHLLHQGPSFFKQ |
| | | AGCAATATGTCGAGGAGTGCAAGGCATTAGGATTTGACACCATCGAGCTGAATGCTGGATCTCTCAAG | YVEECKALGFDTIELNAGSLKLP |
| | | CTCCCGGAAGAAGCTCTCCTGAGATTAGTCCGCCTCATCAAGACTAGTGGTTTGCAAGCAAAGCCCCT | EEALLRLVRLIKTSGLQAKPLFS |
| | | GTTTTCAGTGAAGTTTGACAGTTCTGATATTCCTCCATCAGGAGATAGGGCATTTGGGGCATACATAG | VKFDSSDIPPSGDRAFGAYIVPV |
| | | TTCCAGTGAAGCAGAATTCAGAAAGAGTTGAGGATGTTGACCTGTTGATAAGGAGAGCCGAGAGGTGC | KQNSERVEDVDLLIRRAERCLEA |
| | | TTGGAAGCAGGGGCAGACATGATCATGATCGATGCCGATGACATTTGCCAGCGCGCCGACTCTCTACG | GADMIMIDADDICQRADSLRADI |
| | | GGCAGACATCGTCGCCAAGATCGTAGGCCGGCTAGGGCTCGAGAAGACCATGTTCGAGGCTTCCAACC | VAKIVGRLGLEKTMFEASNPNTS |
| | | CCAACACCTCCGAGTGGTTCGTCAGAAGATACGGGCCACGGGTGAATCTGTTCGTGGATCACTCCGAC | EWFVRRYGPRVNLFVDHSDVMNL |
| | | GTGATGAACCTGGAGCGTCTCCGAGGCTTCAATATGCGTGGAGTCTGCAACTCTCCCTTGTTCGGAAT | ERLRGFNMRGVCNSPLFGIGSPF |
| | | CGGCTCGCCCTTCTTCCTGATGTGA SEQ ID NO: 49 | FLM* SEQ ID NO: 50 |
| 26 | Xa21_Os01g0134700 | ATGGCGGCGAAGCGGCTTCACGACGGCTACGGACAGGAGGACCAGCCCGACGACAAGCGTGTGCGCCG | MAAKRLHDGYGQEDQPDDKRVRR |
| | | CATGCCGTCCTTCTCGACGGTGATCCGTGAGGCCTTGATGGTGAAGCAGATGCAGACTCTGTTCGTCG | MPSFSTVIREALMVKQMQTLFVA |
| | | CACTGGAGCCACTTCTCCGTAGAGTGGTGCAGGAGGAGCTCCAGGCAGGTCTCGTGCGCAGCCCGCGT | LEPLLRRVVQEELQAGLVRSPRY |
| | | TACATCGAGAGGATGTCGCCTGAGACGCCGCCGGCTCAGCCGCCGATGTGGAAGCTGGCGTTCCGGTT | IERMSPETPPAQPPMWKLAFRFK |
| | | CAAGCCGCAGCTCCCGATCTTCACCGGGAGCAAGATCGAGGACGTGAACGGCAACCCACTGGAGATCA | PQLPIFTGSKIEDVNGNPLEIIL |
| | | TCCTCATCGACGTCGACACCGGCGCGCCGGCGACGATCTCGCAGCCTCTGCGCGTCGAGGTCGTCCCG | IDVDTGAPATISQPLRVEVVPVL |
| | | GTCCTGGGCGACTTCCCGCCGGACGACCGCGAGCACTGGACGGCGGAGGAGTTCCAGCAGAGGGGCAT | GDFPPDDREHWTAEEFQQRGIVK |
| | | CGTGAAGGAGCGCTCCGGCAAGCGCCCGCTCCTCACCGGCGACGTCAGCCTCACCATGCGCGACGGCT | ERSGKRPLLTGDVSLTMRDGCVA |
| | | GCGTCGCCGTGAACGAGCTCCAGTTCACGGACAACTCCTCCTGGGTTCGCTGCCGCAGGTTCCGCATC | VNELQFTDNSSWVRCRRFRIGVR |
| | | GGCGTCCGCGTCGTGCCGGGCAGCTACGACGGCCCAAGAATCGGCGAGGCCATGACCGAGCCCTTCGT | VVPGSYDGPRIGEAMTEPFVVRD |
| | | CGTCAGAGACCACCGCGGCGAACTGTACAGGAAGCACTACCCTCCCGTTCTTGGCGACGATGTCTGGA | HRGELYRKHYPPVLGDDVWRLEK |
| | | GGCTTGAGAAGATTGGCAAGGAGGGTGCCTTCCACAGGAAGCTGACGCAGCACAACGTCAGGAACGTG | IGKEGAFHRKLTQHNVRNVQEFL |
| | | CAGGAGTTCTTGCGGCTGCTCACGGTTAAGCCGGACGAGCTGCGCGCTATCATGGGCGACGGCATGAC | RLLTVKPDELRAIMGDGMTDRMW |
| | | CGATCGCATGTGGGAGGTGACGACGAGCCACGCCAAGAAGTGCGTCCCCGGCGACAAGGTGTACATGT | EVTTSHAKKCVPGDKVYMYSTQH |
| | | ACAGCACGCAGCACGGCACCGTCTACGTCAACTCCATCTTCGAGCTCGTGAAGGTCGAGCTCGCCGGC | GTVYVNSIFELVKVELAGVEYQL |
| | | GTTGAGTACCAGCTGCACCAGCTGAACAGGGGTCAGAGGGCGTTCGTGCATCAGCTGCTGCTGGCGGC | HQLNRGQRAFVHQLLLAAYEQRN |
| | | GTACGAGCAGCGAAACAACCTCCAAGAGGCCGACGCCATGGCGCTCCACTGCAACGACGTTCCTCTGC | NLQEADAMALHCNDVPLLQNAAE |
| | | TGCAGAATGCAGCGGAGATAACTATCCCGGCGCTTGGAGACACGCAGCTGTGGATTCAGAACAGTCTC | ITIPALGDTQLWIQNSLNSQEID |
| | | AACAGCCAAGAAATCGACTTCCAGGTCGACGAGATCCCCCAAGCTAACTTTGCGCTTCAGTGGACTGG | FQVDEIPQANFALQWTGQMYNIS |
| | | CCAAATGTACAACATTTCAGGCTAA SEQ ID NO: 51 | G* SEQ ID NO: 52 |
| 27 | Xa21_Os01g0135700 | ATGTCGAACACCACCGAGACGAAGATGCCGCAGCAGCAGCAGCAGGTTGAGAAGCCGACGGCGTTGGC | MSNTTETKMPQQQQQVEKPTALA |
| | | GCCGGCGGACGCGGAGATCGAGAGGGTCTTCACCCGCTTCGACGCGGACGGGGACGGCAGGATCTCCC | PADAEIERVFTRFDADGDGRISP |
| | | CCTCGGAGCTCGCCGCGGTGACGCGCGCCATCGCGCCGCCGCCCAGCGAGTCGGCCGGCGGCCGCGAG | SELAAVTRAIAPPPSESAGGREV |
| | | GTGGCCGCCATGATGGACGAGCTCGACACCGACCGCGACGGCTTCGTCGACCTCGGCGAGTTCGCGGC | AAMMDELDTDRDGFVDLGEFAAF |
| | | GTTCCACGGCCGCGGGCGCGGGGACGCCGAGCACGAGGCCGAGCTGCGCGCCGCGTTCGACGTGTACG | HGRGRGDAEHEAELRAAFDVYDV |
| | | ACGTCGACGGCGACGGCCGCATCACCGCGGCCGAGCTCGGCAAGGTCCTCGCCCGGATCGGCGAGGGC | DGDGRITAAELGKVLARIGEGCS |
| | | TGCAGCGCCGAGGAGTGCGAGAGGATGATCGCCTCCGTCGACGTCGATGGCGATGGCTGCGTCGGGTT | AEECERMIASVDVDGDGCVGFEE |
| | | CGAGGAGTTCAAGAAGATGATGTCCCGTGATGCCGCTGCAACCGGCGGCGCTGACAAGGCCAAGACGG | FKKMMSRDAAATGGADKAKTE* |
| | | AGTAA SEQ ID NO: 53 | SEQ ID NO: 54 |
| 28 | Xa21_Os01g0534800 | ATGGATTTCGAGCTGCGCAAGGCGCGGGAGAAGCTGGAGCGGGAGCAGCGGGAGCGCGTGCAGCACGC | MDFELRKAREKLEREQRERVQHA |
| | | CAAGGCCAAGGCCGAACGCGAGCGCCGCGCCAAGGCCGAGGCCGCGCGCCGCCGCGACGCGCTCGAGG | KAKAERERRAKAEAARRRDALEA |
| | | CGTCCCACCGCGAGCGCCGCCTCGACGCCGCGCGCGCGCAGGAAGAGGCTCAGCAAAAGATGGAAGAG | SHRERRLDAARAQEEAQQKMEEV |
| | | GTGATGCAACTTGGAAAGGGGATTTCTTTCTCGCACATGTTTGAAGCTCTTCGATATGATGGTCCTGG | MQLGKGISFSHMFEALRYDGPGD |
| | | GGACAAGATCAAGTTGCCACCATCGTCTTTTAAGGAATTGTCTGATGAAGGAGCACTGGACAAAGGTC | KIKLPPSSFKELSDEGALDKGPM |
| | | CCATGTACTTCAGGTTGTCAAAGGTTAGAGACAGTGTTCCGGGTGCCCCTCAGGATCATGATGCCGAT | YFRLSKVRDSVPGAPQDHDADEA |
| | | GAGGCAACATGTTGTGGTGTTCTTGAGTTCACTGCAAGGGAAGGCTCCGCAGAACTCACTCCACATGT | TCCGVLEFTAREGSAELTPHVWN |
| | | GTGGAACAATCTGTTCCGGGGTGATAGCCCAGATGTTCCTCTGATTGAGGTTAGGTATGTCAGTTTAC | NLFRGDSPDVPLIEVRYVSLPKG |
| | | CCAAAGGGACATATGCGAAGCTGAAGCCAGTAGGAGTGGGGTTCTCAGACCTTCCTAACCATAGGGCT | TYAKLKPVGVGFSDLPNHRAVLE |
| | | GTCCTTGAAACGGCACTCCGCAATCATGCAACACTATCTGAAAATGATTTTGTTGTGGTGAATTATGG | TALRNHATLSENDFVVVNYGQLQ |
| | | GCAACTGCAATACAAGTTGAAGGTTCTTGAATTAAAACCTGCATCAAGTGTTTCTGTCCTGGAGACAG | YKLKVLELKPASSVSVLETDVEV |
| | | ATGTGGAAGTTGACATTGAAGGACCAGATTCAGTTTTGGACAACGTAGAGAATCAACATGTGCTTGTG | DIEGPDSVLDNVENQHVLVPLET |
| | | CCACTTGAGACTGGAAAGGTTGAATCTGGAGTTGTGGAAGAAGGAAAGTTTAGGTACTACAAATTTCT | GKVESGVVEEGKFRYYKFLVDEG |
| | | TGTTGATGAAGGTATGGGTGAGAAAGTAGTTTCTAGGCATGCAAATATTGAGGTTAAGATAGAGACAG | MGEKVVSRHANIEVKIETDTSGG |
| | | ATACAAGTGGTGGTGACACTGATATTTATGTATCAAGGCATCCTTTAGTTTTCCCAACTCAGCACCGT | DTDIYVSRHPLVFPTQHRHEWSS |
| | | CACGAATGGTCTTCTCATGAAATGGGATCTAAGGTCCTCATACTGAAACCAAGGGATGCCAGTCTCGC | HEMGSKVLILKPRDASLASGTYS |
| | | CAGTGGTACCTACAGTATTGGAGTTTATGGTTTCAAGGGAACCACTAAATACCAACTTTCTGTGGCTA | IGVYGFKGTTKYQLSVAIKDVLN |
| | | TTAAAGATGTTCTTAATGGCCAAAGGATTGGTGAGCAGGCTAGTGCCTCATCTAGTGTTGATGTTGAT | GQRIGEQASASSSVDVDSVVCKN |
| | | TCAGTGGTGTGCAAGAACTGCAAACGCTATATATCCAGCCGAACTTCACTACTTCATGAAGCATACTG | CKRYISSRTSLLHEAYCVRHNVV |
| | | TGTGAGACACAATGTTGTTTGCATGCATGATGGGTGTGGTGTTGTTCTTCGAAAGGAGGAAGCAACAG | CMHDGCGVVLRKEEATDHVHCNK |
| | | ATCACGTGCATTGCAACAAGTGTGGGCAAGCTTTCCAGCAGAGAGAAATGGAGAAGCACATGAAAGTT | CGQAFQQREMEKHMKVFHEPLQC |
| | | TTCCATGAGCCACTACAATGCCCTTGCGGGGTGGTCCTTGAAAAGGAAGATATGGTTCAACACCAATC | PCGVVLEKEDMVQHQSSTCPLRL |
| | | CTCAACCTGCCCTTTGCGCTTGATTGTGTGCCGATTTTGTGGTGACACTGTTCAAGCTGGTGGAGAAC | IVCRFCGDTVQAGGEPLDARDRL |
| | | CACTTGATGCTCGGGATCGGCTTCGCAACATGTGTGAGCACGAGAGTATCTGTGGATCCAGGACTGCA | RNMCEHESICGSRTAPCDSCGRS |
| | | CCATGTGATTCTTGTGGACGGTCAGTCATGCTGAAGGACATGGACATTCATGTGATTGCTGTGCATCA | VMLKDMDIHVIAVHQKS* |
| | | GAAGAGCTAA SEQ ID NO: 55 | SEQ ID NO: 56 |
| 29 | Xa21_Os01g0570800 | ATGACTCTGCGGCCACTCAACACAGAGAGAAGCTTCCTCCTCTCCTCCCCGAAGCCACACAGCCCCAG | MTLRPLNTERSFLLSSPKPHSPR |
| | | GGATGCCTGCTCGCCGCCGGTGAGGTCGCCCTCCTCCACCAGGCTCCTCGCCTGCAGGAAGCTCCCCT | DACSPPVRSPSSTRLLACRKLPS |
| | | CCTCCTCCACCAACAGCAAGCCCATGGCCACCGGCGCCGGCGTCCTCGAGAGGTCTCTCAGCTTCAAG | SSTNSKPMATGAGVLERSLSFKN |
| | | AACTGGGAGCCCACCGCGGCGGAGGTCGCCGCGCCGCCGCCGCACGATGAGGCGGCGAGCCGGTGCAT | WEPTAAEVAAPPPHDEAASRCIN |
| | | CAACGGCGCGCGGCCGGGGATCCTGCTGCTGCAGCAGAGCCCCAAGGCCAAGCAGGGCGACGCCGCCG | GARPGILLLQQSPKAKQGDAAAT |
| | | CGACGTCGCCGGCGCAGGCCGCGCTGATCGAGTTCATCTCGCCGAAGCCGCGGTCGGAGCTGGACCAG | SPAQAALIEFISPKPRSELDQAA |
| | | GCGGCGACCAAGGTGCAGAAGCTGTTCAAGGGGCACCGCACCCGGCGGAACCTCGCCGACTGCGCCAT | TKVQKLFKGHRTRRNLADCAIVV |
| | | TGTCGTGGAGGAGCTGTGGTGGAAGGCCTACGACTCCGCCTGCCTCAACATCAAGTCCATCTCCTTCT | EELWWKAYDSACLNIKSISFFDE |
| | | TCGACGAGGCCAAGCAGGAGACCGCGGCGTCGCGCTGGTCCAGGGCCGGCAAGCGCATCGCCAAGGTC | AKQETAASRWSRAGKRIAKVGKG |
| | | GGCAAGGGCCTCTCCAAGAACGAGAAAGCCCAGAAGCTCGCGCTCCAGCACTGGCTCGAAGCTATCGA | LSKNEKAQKLALQHWLEAIDPRH |
| | | CCCGCGCCACCGCTACGGCCACAACTTGCATCTGTACTACGACATCTGGTCTGCGAGTTCGAGCACTG | RYGHNLHLYYDIWSASSSTEPFF |
| | | AGCCATTCTTTTACTGGCTGGATGTAGGAGCTGGGAGAGACATGCATCACCAAAAGTGCCCGAGAAGC | YWLDVGAGRDMHHQKCPRSKLYS |
| | | AAGCTTTATTCACAGCTGATCATGTACCTTGGACCAAACGAGAGGGAGGCTTTTGAAGTTGTTGTGGA | QLIMYLGPNEREAFEVVVEGGKL |
| | | GGGTGGGAAGCTGATGTACAGGAAGAGTGGAGTTCTTGTGAACACCACTGAAGATTCCAAGTGGATAT | MYRKSGVLVNTTEDSKWIFVLST |
| | | TTGTGTTGAGCACAACAAGATCATTATATGTTGGACAGAAGAAGAAGGGTAAATTTCAGCACTCAAGT | TRSLYVGQKKKGKFQHSSFLAGA |
| | | TTCCTAGCTGGGGCAGCTACAACGGCTGCTGGAAGATTGGTTGCCAAAGATGGTGTTCTTCAGGCGAT | ATTAAGRLVAKDGVLQAIWPYSG |
| | | ATGGCCATACAGCGGTCACTACCTCCCAACAGAAGAGAACTTCAGAGAGTTCATCAGCTTCTTGGAGG | HYLPTEENFREFISFLEENSVDL |
| | | AGAACAGTGTTGATCTTGCCGATGTCAAGAGATGTTCGGTCGACGACGATGAATTCCCGTCATTCAAG | ADVKRCSVDDDEFPSFKKTEEKP |
| | | AAGACAGAGGAGAAACCAGAGGAAGCTGAGAAGCCTACTGAACCCACACATGATGAGATCATGGACAG | EEAEKPTEPTHDEIMDSSQIELP |
| | | CTCACAGATTGAGCTGCCTGAGGTAGACATAGTGAAGGAAGCGGTTGTCGAAAACAGCGAGGACACCG | EVDIVKEAVVENSEDTEVAPIMA |
| | | AGGTGGCACCGATCATGGCCAGCCGCCCATCCTTCAAATGGGCAACCGCGAATGGCGCTCGCATTGGC | SRPSFKWATANGARIGCVRDYPA |
| | | TGTGTCCGGGACTACCCGGCTGATCTCCAGAGCATGGCCCTTGAGCATGTCAATCTTTCACCAAGAGT | DLQSMALEHVNLSPRVVPSPTTN |
| | | GGTGCCCTCTCCTACTACAAACAGGCTGCCGATACCGTCTCCTCGGCCAAGCCCGAAGATCAGGCTGT | RLPIPSPRPSPKIRLSPRLHYMG |
| | | CACCTAGGCTGCACTACATGGGTCTCCCGACGCCTACCGGTTGCAAGCTCCCGATCCCGAGCCCGGAG | LPTPTGCKLPIPSPEIRRSPRDQ |
| | | ATCAGGAGGTCACCAAGGGATCAGTTCATGGGGTTTCAGACACCGTCAGTGTCTCTCACACTCCCAAA | FMGFQTPSVSLTLPKLGK* |
| | | GCTTGGGAAGTGA SEQ ID NO: 57 | SEQ ID NO: 58 |
| 30 | Xa21_Os01g0597600 | ATGGCAGATCAGAAGGTGATTCTCGCCGAGCCGCTGCTTCCGGGGAAGGAAGCTGACTTCGCCGACGA | MADQKVILAEPLLPGKEADFADD |
| | | CGACGACGTGGAGGCGCAGCTCACTTCGTACCACACCGGCGCCTCCTTCTCCAGGACGTGCCTCAACC | DDVEAQLTSYHTGASFSRTCLNL |
| | | TCACCAATGCCGTCTCCGGCATCGGGGTGCTGTCCATGCCGTACGCGGTGTCGCAGGGCGGGTGGCTC | TNAVSGIGVLSMPYAVSQGGWLS |
| | | AGCCTGCTGCTCTTCGTCCTCGTCGGCGCCGTGTGCTACTACACCGGCACGCTCATCGAGCGCTGCAT | LLLFVLVGAVCYYTGTLIERCMR |
| | | GCGCGCCGACGGCTCCATCGCCAGCTACCCGGACATCGGCCAGTACGCCTTCGGCGCCACCGGCAGGA | ADGSIASYPDIGQYAFGATGRRA |
| | | GAGCCGTCGCATTCTTCATGTACGTCGAGCTCTACCTCGTCGCCATAAGCTTCCTCGTCCTCGAGGGC | VAFFMYVELYLVAISFLVLEGDN |
| | | GACAATCTCGACAAGCTCTTCCCCGGCGCAACCATGGAGATTCTTGGCTACCAGCTCCACGGCAAGCA | LDKLFPGATMEILGYQLHGKQLF |
| | | GCTATTCATTGTACTCGCCGCCGCCGTCATACTGCCCACTACCTGGCTCAAGAATCTTGGCATGCTCG | IVLAAAVILPTTWLKNLGMLAYV |
| | | CTTACGTGTCAGCGGCCGGGCTCATCGCCTCGGTGGCCTTGACGGCGTCACTGATCTGGGCCGGTGTC | SAAGLIASVALTASLIWAGVAET |
| | | GCCGAGACCGGGTTCCACCGGAACAGCAACACGCTCAACCTCGCCGGAATCCCCACCTCCCTCGGTCT | GFHRNSNTLNLAGIPTSLGLYFV |
| | | CTACTTCGTCTGCTTCACCGGCCACGCCGTCTTCCCGACGATATACTCCTCCATGAAGAACAGCAAAC | CFTGHAVFPTIYSSMKNSKHFSK |
| | | ACTTCTCCAAAGTTCTCTTGATCTCGTCGGTGCTGTGCAGCCTCAACTACGGGCTCACGGCGGTGCTG | VLLISSVLCSLNYGLTAVLGYMI |
| | | GGCTACATGATCTACGGTGACGATGTGCAGTCGCAGGTGACGCTGAACCTGCCCTCCGGCAAGCTCTA | YGDDVQSQVTLNLPSGKLYTKIA |
| | | CACCAAGATCGCCATCGTGATGACGCTGGTGAACCCGTTGGCCAAGTACGCGCTGCTCGTGGCGCCGA | IVMTLVNPLAKYALLVAPITAAV |
| | | TCACGGCGGCCGTCGAGGAGAGGCTGTCTCTGACGCGGGGCAGCGCGCCGGCGAGGGTGGCCATCAGC | EERLSLTRGSAPARVAISTAILA |
| | | ACCGCCATCCTCGCCAGCACGGTGGTGGTGGCGTCGACGGTGCCCTTCTTCGGCTACCTCATGTCATT | STVVVASTVPFFGYLMSFIGSFL |
| | | CATCGGCTCGTTCCTCAGCGTCATGGCGACCGTGCTGTTCCCTTGCCTCTGCTACCTCAAGATCTACA | SVMATVLFPCLCYLKIYKADGIH |
| | | AGGCCGATGGCATCCACCGCACGGAGATGGTGGCCATCGCCGGAATTCTGCTGCTAGGAGTGTTCGTC | RTEMVAIAGILLLGVFVAVTGTY |
| | | GCCGTCACCGGCACGTACACTTCTTTGCTGCAGATTATAGCCACTTTCTGA | TSLLQIIATF* |
| | | SEQ ID NO: 59 | SEQ ID NO: 60 |
| 31 | Xa21_Os01g0612900 | ATGGCATTCGCCGGGGACGCGCGGATCGTCGTCGCCGTGGCGGCGGTGGCGGCGTTCGTCCTCGTCGG | MAFAGDARIVVAVAAVAAFVLVG |
| | | CGTGGCGGCGGAGGGGAAGGGGGAGGGGGGAGGAGGAGGGGTGGGGGTGTGCTTCGAGAGGATATTCA | VAAEGKGEGGGGGVGVCFERIFS |
| | | GCTTCGGGGACTCGCTGACGGACACCGGCAACTTCCTGCTCTCCGTGCCGGAGGACTTCCCGGACCCC | FGDSLTDTGNFLLSVPEDFPDPA |
| | | GCCCGCAGCCTCCCCTACGGCCAGACCTTCTTCGGCCGCCCCTCCGGCCGCTACTCCGACGGCCGCAA | RSLPYGQTFFGRPSGRYSDGRNL |
| | | CCTCCTCGACTTCTTCGGTATCATCCCCCTCCTCCTCTTCATTTCATTTTTCTTCAGATTTTTTTTCT | LDFFGIIPLLLFISFFFRFFFSH |
| | | CTCATCCTGCCATCCGGGACCGGGACCCCCTTCGGCTTCCCTGTTTGTTTTGTTTATTCTGTTGGTGT | PAIRDRDPLRLPCLFCLFCWCRV |
| | | CGGGTCCCCCTCTGGTAA SEQ ID NO: 61 | PLW* SEQ ID NO: 62 |
| 32 | Xa21_OsI_02945 | ATGCCTGCATTAAGGATGAATAAAATGTTAAGCACCGACTATTTAGGGACGCAGGAGCTTCATTCATT | MPALRMNKMLSTDYLGTQELHSF |
| | (Os01g0629400) | TTGCAAGACCACCGAAATATTGGAAGACTCACAGTCTCAAGAGATTGCACTCGATAGAACAGCGGTGG | CKTTEILEDSQSQEIALDRTAVG |
| | | GGTCAACACTTCTAAGTCATCAAAATGTTTGCTCTACTTCTGAAGTATCAGGGGGAAACTTTGGAATC | STLLSHQNVCSTSEVSGGNFGIA |
| | | GCTGAAGTCAGTTTTTTACAGGATGAATATGATGCAGAAACCACCGGTGTACTGCCACCATCATTTTT | EVSFLQDEYDAETTGVLPPSFLS |
| | | GTCCTGTGGCTCTAGATCTATGCTCCCTATATCAGTACCATCATCATCATCATCTAGTCTGGAGACTG | CGSRSMLPISVPSSSSSSLETVL |
| | | TCCTCTTATCTGACTCAACGTACAGCGATCTTCAGGTAAAAGAGACGAACCACAATTCTACAGCAATG | LSDSTYSDLQVKETNHNSTAMDE |
| | | GATGAAAACAATGAGTTCCTTCAGCTGATTCTTAGTAGCAATGATGAAGGATACAATGCTGGAAGTGA | NNEFLQLILSSNDEGYNAGSEFQ |
| | | ATTCCAAGTTTGGGATGTTCTGGACTTCTACTTCTCAGAAAGCTTTTCAGCTGTGCAGTTTGATAGCT | VWDVLDFYFSESFSAVQFDSLMG |
| | | TGATGGGTTTTACAAATGATGTTAGTTCTTCCCATCACGATTGTATGAATCTTGTTGACATGGTAGAG | FTNDVSSSHHDCMNLVDMVERPV |
| | | CGGCCTGTTGCGCTCCTGTCCCTAAATGATACCGAGGAGCAAAATAACTCTACTGATGAGTTCCCTGA | ALLSLNDTEEQNNSTDEFPDDTS |
| | | TGATACATCATCATACCTTCAAATGAAACCCTCAGATTCCGAAACTGAAAGTAATTATGCCTCTCGAG | SYLQMKPSDSETESNYASRDVAV |
| | | ATGTTGCGGTAACTGAATATGTTGATGAAAAGCCACTTTCTAGAGGCCTGCCTGATTTAATGGATGTC | TEYVDEKPLSRGLPDLMDVDSPG |
| | | GACTCACCCGGTCGTCTATCAAAATCAGCAAGATCAAAACAAATCACTCTTGTTCTGGATTTGGACGA | RLSKSARSKQITLVLDLDETLVH |
| | | GACTCTTGTACATTCAACATTGGATCATTGTGACAATGTTGATTTCACCCTTCAAGTTTTCTTTAATA | STLDHCDNVDFTLQVFFNMKNHT |
| | | TGAAGAACCATACAGTTTATGTTAGGCAAAGACCTCATCTGAAGATGTTTCTTGAGAAGGTAGCTCAG | VYVRQRPHLKMFLEKVAQMFELV |
| | | ATGTTTGAGCTTGTCATTTTCACAGCTAGCCAGAGAATTTATGCCGAGCAACTAATAGATAGACTCGA | IFTASQRIYAEQLIDRLDPDGRL |
| | | CCCTGATGGGAGGTTGATTTCACACCGTATTTATCGTGAGTCATGTATATTCTCTGAGGGTTGCTATA | ISHRIYRESCIFSEGCYTKDLTI |
| | | CAAAGGATCTGACAATTCTTGGAGTTGACCTGGCAAAAGTTGTAATAGTTGACAATACTCCACAGGTT | LGVDLAKVVIVDNTPQVFQLQVD |
| | | TTCCAGTTGCAAGTGGACAATGGTATACCAATAAAGAGCTGGTTTGATGACCCCTCAGACCAGGAATT | NGIPIKSWFDDPSDQELVELLPF |
| | | GGTCGAGTTACTCCCATTCCTGGAGACACTTCTTGGTGTGGAGGACGTTAGGCCAATAATCTCGAAGA | LETLLGVEDVRPIISKTFHHTPE |
| | | CATTCCACCATACACCTGAGCAGAATTAG SEQ ID NO: 63 | QN* SEQ ID NO: 64 |
| 33 | Xa21_Os01g0631800 | ATGGCTGCTGGCGTGGGCAAGGTGGGGGAGTGGATAAGGAGGCGGATGATGCCGCGGAGGAGCAAGAG | MAAGVGKVGEWIRRRMMPRRSKS |
| | | CAAGGCGGCCGGCCCGAGCCGGAGCCGGAGCGACGGCGACGGCGACGGCGGCGAGGCCTTGCCGTTGC | KAAGPSRSRSDGDGDGGEALPLP |
| | | CGGCGCCACCGCAGAGGAAGCTCCGGGCGCGGGCGTTGCCGGCGGCGTTGCGGTGGCGGCCGCGGGGG | APPQRKLRARALPAALRWRPRGR |
| | | CGCGTGCTGGCGGTGCTGTACGAGAAGGTGGTGTACCACCTGCTGTGGCTGGTGGAGTCCGTCGTCGT | VLAVLYEKVVYHLLWLVESVVVV |
| | | CGTCGCCAGGCTCTGCTTCTTCGTCATGCGCTTCGGCCTCAAGCAGCTCTGA | ARLCFFVMRFGLKQL* |
| | | SEQ ID NO: 65 | SEQ ID NO: 66 |
| 34 | Xa21_Os01g0717000 | ATGGTGGCGATCGAGAACCAGAGCCAGGGCCAGCGGGCGGCGGAGGCGGCGGCGCAGCCACGGATCCC | MVAIENQSQGQRAAEAAAQPRIP |
| | | CAGGGAGGCGCGGCGGCTACTGCACGAGATGGCGGCGTCGTGGGCGGACGTTGCCGACTGCCGGGCGC | REARRLLHEMAASWADVADCRAL |
| | | TGCAGGTGATTCCGCTCAAGGGCGCCATGACCAACGAGGTGTACCAGGTGCGCTGGCTCAACGGCGCC | QVIPLKGAMTNEVYQVRWLNGAP |
| | | CCCGCCCCCGCAACCACCGCCGCCGCCGAAGGCGGCGAGGCGGAGGCGGAGGCGGCCGCAAGGGAGAG | APATTAAAEGGEAEAEAAARERE |
| | | GGAGGTGAGGAAGGTCCTCGTGCGGATATACGGCGACGGCGTGGAGCTCTTCTTCGACCGCGAGGACG | VRKVLVRIYGDGVELFFDREDEV |
| | | AGGTGCGCACCTTCGAGTGCATGTCTCGCCATGGCCAGGGCCCCCGCCTCCTCGGCCGCTTCCCCAAC | RTFECMSRHGQGPRLLGRFPNGR |
| | | GGCCGCGTCGAGGAGTTCATCCACGCAAGGACACTATCTGCAGCAGACCTTCGTGATCCTGAAATTTC | VEEFIHARTLSAADLRDPEISAL |
| | | AGCTCTGGTGGCGTCAAAACTGAGGGAATTCCACAACCTTGACATGCCTGGCCCGAAATCTGTACTCA | VASKLREFHNLDMPGPKSVLIWD |
| | | TTTGGGACCGACTAAAAAACTGGCTCAAAACTGCAAGGAACCTGTGCTCATCTGATGAATCCAAGAAA | RLKNWLKTARNLCSSDESKKFRL |
| | | TTTCGGCTGGGTAGCCTGGAGAACGAGATTGCTGCATTGGAGAAAGAATTTTCAGGGGATTACCACGG | GSLENEIAALEKEFSGDYHGIGF |
| | | GATTGGTTTTTGCCACAACGATCTTCAGTATGGCAACATCATGATTGATGAAGACACCAACATGTTGA | CHNDLQYGNIMIDEDTNMLTIID |
| | | CTATCATCGATTATGAGTATGCCAGCTTCAATCCAGTTGCGTATGACATCGCTAATCATTTCTGCGAG | YEYASFNPVAYDIANHFCEMAAD |
| | | ATGGCAGCAGACTATCATTCAGAGAAGCCACATGTACTGGACTACAGTAAATATCCAGACACTGATGA | YHSEKPHVLDYSKYPDTDEQERF |
| | | GCAGGAGCGTTTTGTGAAGACGTACCTAAGCAATTCTGTAAGTGAAGAACCTGATACGGAAGAGGTGG | VKTYLSNSVSEEPDTEEVENLLQ |
| | | AGAACCTTCTCCAAAGCATTGAGAAATACACGCTCGCCAGTCATCTAGTTTGGGGCCTCTGGGGAATA | SIEKYTLASHLVWGLWGIISDHV |
| | | ATATCGGATCATGTCAATGATATTGACTTCGACTACAAGGAGTATGCAAGGCAGAGATTCGAGCAGTA | NDIDFDYKEYARQRFEQYWQKKQ |
| | | TTGGCAGAAGAAGCAAGCACTTTTAACTTCATGA SEQ ID NO: 67 | ALLTS* SEQ ID NO: 68 |
| 35 | Xa21_Os01g0797600 | ATGGCGCCCAGAGCAGCTACGGTGGAGAAGGTTGCTGTGGCGCCACCCACCGGGCTTGGTCTTGGCGT | MAPRAATVEKVAVAPPTGLGLGV |
| | | CGGCGGAGGTGTCGGAGCCGGGGGTCCTCACTACAGGGGCGTCCGCAAGCGCCCGTGGGGGCGTTACG | GGGVGAGGPHYRGVRKRPWGRYA |
| | | CCGCGGAGATCCGTGACCCGGCCAAGAAGAGCCGGGTGTGGCTCGGTACCTACGACACGGCAGAGGAG | AEIRDPAKKSRVWLGTYDTAEEA |
| | | GCCGCCCGCGCCTACGACGCCGCCGCTCGAGAGTTCCGGGGTGCCAAGGCAAAAACGAACTTTCCGTT | ARAYDAAAREFRGAKAKTNFPFA |
| | | TGCATCACAGTCGATGGTCGACTGTGGCGGCAGCCCCAGCAGCAATAGCACGGTAGACACCGGTGGCG | SQSMVDCGGSPSSNSTVDTGGGG |
| | | GCGGGGTTCAGACGCCTATGCAGGCCATGCCTCTGCCGCCTACTCTGGACTTGGATTTGTTCCACCGC | VQTPMQAMPLPPTLDLDLFHRAA |
| | | GCGGCTGCTGTGACTGCAGTCGCCGGCACCGGCGTTCGCTTTCCTTTCAGAGGATATCCCGTTGCACG | AVTAVAGTGVRFPFRGYPVARPA |
| | | TCCAGCAACGCATCCTTACTTTTTCTATGAGCAGGCTGCAGCGGCTGCCGCAGCAGCTGCGGCTGGAT | THPYFFYEQAAAAAAAAAAGYRV |
| | | ACCGTGTGATGAAGCTTGCACCGCCGGTCACCGTGGCGGCGGTTGCACAAAGTGACTCCGACTCCTCG | MKLAPPVTVAAVAQSDSDSSSVV |
| | | TCGGTGGTTGATCTCGCGCCGTCACCTCCAGCGGTTACGGCGAACAAGGCGGCAGCTTTCGATCTGGA | DLAPSPPAVTANKAAAFDLDLNR |
| | | TCTGAACCGGCCGCCGCCGGTAGAGAACTAG | PPPVEN* |
| | | SEQ ID NO: 69 | SEQ ID NO: 70 |
| 36 | Xa21_OsJ_04094 | ATGGCCGCGGCGGCGGCGCAGTCCGTGGCGTCGGCTTCGTCGTCGTCCAGCCCCGTCCTGTCGGCCGC | MAAAAAQSVASASSSSSPVLSAA |
| | | GCACCGCCGCCGGCTCAACGACGTCGAGCGAGACGCGTTCGACTACGGCGGCCCGTGCGACGTCGACG | HRRRLNDVERDAFDYGGPCDVDV |
| | | TCGATCATGATGACGACGACGGCGGCGGCGGAGTGCGCCGCGGGCACGGCGCCGGCGTGGCGGGTGTC | DHDDDDGGGGVRRGHGAGVAGVR |
| | | AGGGCGCTGTTCTCGTCGGCCAGGAGGAGCAAGAGGGCGTCCGTGATTATCGATCAGGCATGGCTGCG | ALFSSARRSKRASVIIDQAWLRN |
| | | GAACGTGGTCGCGTGCCTGCTCGGCCTCACCGTCGTCGCCGGGCTCGTGCTGAGCTCGCACCGAGTGA | VVACLLGLTVVAGLVLSSHRVSG |
| | | GCGGCGCCGGCGGCGGGAGGCTCGTGCAGAGGATGGACCTCGGTGACGGCGAAGTGATGGGCTGGACG | AGGGRLVQRMDLGDGEVMGWTEE |
| | | GAGGAGAACTTGACGGCTGTTGCTCGCCAGTCACCTGACACGCCGATGAAGATATGGATGACGCCAGA | NLTAVARQSPDTPMKIWMTPDSE |
| | | TAGTGAAGGTTATGGCAAATGCATTGAACGCCCAAAGAAACATGACAGAATGAACAGTGCAACAGCTG | GYGKCIERPKKHDRMNSATAGYI |
| | | GTTATATAATTGTTAATGCCAATGGTGGATTGAACCAGATGAGACTGGGAATAAGCGACATGGTTGCA | IVNANGGLNQMRLGISDMVAVAK |
| | | GTTGCTAAGCTCATGAATGCAACACTAGTAATCCCTACTCTGGATCACAAATCATTTTGGACTGATCC | LMNATLVIPTLDHKSFWTDPSDF |
| | | AAGTGATTTCAAAGATATATTTGATGTGGAACACTTCAAGAAAACTTTAGAGGGTGACATTTCGATTG | KDIFDVEHFKKTLEGDISIVDSL |
| | | TGGATTCCTTGCCACTAGCTTATAAAGGATTGAAACTTTATATGAGAGCACCCACTTCTTGGGCCAAG | PLAYKGLKLYMRAPTSWAKASYY |
| | | GCTTCTTACTACAGAGCTTTCTCAAGGACACTGAAGAAGGCCAAAGTTGTGAAATTCACACATACAGA | RAFSRTLKKAKVVKFTHTDSRIV |
| | | TTCACGAATTGTTAACAATGGTCTCCCCCCATCCATCCAACGACTCCGTTGTCGGGCAAATTATGAGG | NNGLPPSIQRLRCRANYEALRFH |
| | | CACTAAGATTCCACAAAGAAATTGAAGAGCTGAGTACTGCTCTAGTTGATAGACTTAGGAATGGATCC | KEIEELSTALVDRLRNGSNHYIA |
| | | AATCATTATATCGCACTTCACTTAAGGTATGAGAAGGACATGCTCTCATTTACTGGTTGCAGCCACAA | LHLRYEKDMLSFTGCSHNLTHKE |
| | | CCTAACACATAAAGAGGCAGATGAGCTGAGAGAAATGAGACTCAACGTGCGGCACTGGAAAGAGAAGG | ADELREMRLNVRHWKEKEINSRE |
| | | AAATCAACAGTAGGGAGAGGAGACTCCAAGGACGCTGCCCTATGACTCCTCGTGAAGTAGCTCTTTTC | RRLQGRCPMTPREVALFLKAMGY |
| | | CTCAAAGCTATGGGCTATCCTTCCAGCACAAAGATCTATATTGTAGCAGGTGAAATATATGGTGGACA | PSSTKIYIVAGEIYGGHSMDSLK |
| | | TAGCATGGATTCATTAAAGGCTGAATATCCAAACATATATACACATTATAGTCTGGCAACGGTTGATG | AEYPNIYTHYSLATVDELEPFKL |
| | | AGTTAGAGCCTTTCAAGCTATACCAAAACAGATTAGCTGCCTTGGACTATAATGTAGCCGTCCAAAGT | YQNRLAALDYNVAVQSDVFVYTY |
| | | GATGTTTTTGTGTATACGTATGATGGAAATATGGCTAAAGCAGTACAGGGTCACAGAAGATTTGAAGG | DGNMAKAVQGHRRFEGFQKTINP |
| | | ATTCCAAAAAACCATCAACCCAGACAGGCAGAAGCTTGTGGGACTCATTGACAAGCTTGATGAAGGTA | DRQKLVGLIDKLDEGTLTWNEFQ |
| | | CACTAACATGGAATGAGTTCCAAAGTGAAGTGAAGATACATCATGAAAACAGACTTGGGGGTCCATAT | SEVKIHHENRLGGPYQRLSGRSP |
| | | CAGAGGTTATCTGGTCGAAGTCCAAGGCAAGAGGAGTACTTCTACGCAAATCCCCTTCCAGGGTGCTT | RQEEYFYANPLPGCLCKRMQRIK |
| | | GTGCAAAAGAATGCAAAGGATTAAATGA SEQ ID NO: 71 | * SEQ ID NO: 72 |
| 37 | Xa21_Os01g0934100 | ATGGCGCAGAGGACGCTGGAGCTGACGCTGATCTCGGCCAAGGATCTCAAGGACGTGAACCTCCTCTC | MAQRTLELTLISAKDLKDVNLLS |
| | | CAAGATGGAGGTCTACGCCGTCGTCTCGCTCTCCGGCGACCCGCGCTCGCGGCAGCGGATCGCCACCG | KMEVYAVVSLSGDPRSRQRIATD |
| | | ACCGCGCCGGCGGCCGCAACCCGGCGTGGAACGCCTCCCCGCTCCGGTTCACCGTCCCGGCATCCGGC | RAGGRNPAWNASPLRFTVPASGA |
| | | GCCGGGTCCCTCCACGTCCTCCTCCGCGCCGAGCGCGCCCTCGGCGACCGCGACGTCGGCGAGGTCCA | GSLHVLLRAERALGDRDVGEVHI |
| | | CATCCCTCTCTCGGAGCTCCTCTCCAGCGCCCCCGACGGCGCCGTCCCCGCCAAGTTCGTCTCCTACC | PLSELLSSAPDGAVPAKFVSYQV |
| | | AGGTCCGCAAGATCTCCTCCGGGAAGCCACAGGGCGTCCTCAATTTCTCCTACAAGATCGGCGAGGTA | RKISSGKPQGVLNFSYKIGEVTQ |
| | | ACCCAATCCGGCTCCTACCCTGGTGCCTCTCCTCCGGTCGCGTACGGCCAATCTCCACCGGCGCCAGC | SGSYPGASPPVAYGQSPPAPAYP |
| | | CTACCCGCCCTCCGCCGCCGCCGCCGCCGCGGCCTACCCGCCCCAATCCACCTACCCACCACCGACCG | PSAAAAAAAYPPQSTYPPPTAYP |
| | | CCTACCCAACGGCAGCGAAGGCCGATGGGTCAGCCGCCGCGGCCTACCCACCCCAGTCCGCCTACCCA | TAAKADGSAAAAYPPQSAYPPPG |
| | | CCTCCGGGTAAGGGAAACGAGCCATCGACGGCTTACCCACCTCCCGCCGGCTACCCGCCGGCGACCGG | KGNEPSTAYPPPAGYPPATGSSK |
| | | AAGTAGTAAGCCGGCGAAGGCGGGTGAGCCGGTGACGGCCTACCCAGCCGCCGCGGGACCGAGCACCG | PAKAGEPVTAYPAAAGPSTAAPP |
| | | CCGCGCCACCGCCGCAGTACGGCTACGGATACCCCGCCCAGCCGCCGCCGCCGCAAGCCGGCTACGGC | PQYGYGYPAQPPPPQAGYGYPPP |
| | | TACCCGCCCCCGCCGCCGCAAGCCGGGTACGGCGGCGGCTACGGCTACCCGCCGCAGGCTGGGTACGG | PPQAGYGGGYGYPPQAGYGGYQQ |
| | | CGGCTACCAGCAGCAGGCCGTGAAGCCGGCGAAGAAGAACAACTTCGGGATGGGGCTCGGAGCCGGGC | QAVKPAKKNNFGMGLGAGLLGGA |
| | | TGCTCGGAGGCGCCCTCGGTGGCCTCCTCATCGGAGACGCCATCTCCGACGCGTCGGCGTATGACGCC | LGGLLIGDAISDASAYDAGYDAG |
| | | GGCTACGACGCCGGGTTCGACGACGGCGGTGGCTTCGATTTCTAG | FDDGGGFDF* |
| | | SEQ ID NO: 73 | SEQ ID NO: 74 |
| 38 | Xa21_OsJ_05190 | ATGATGAGGAAGCAATACTCTTTCACTCTTTGCCTGATGCTCCTGCTTGTGGCTGCTCTGCTTTGCAC | MMRKQYSFTLCLMLLLVAALLCT |
| | (Os02g0123800) | CATGAACACCATCTCCGTCGAAGCAGGAAGGAGTGGTTACAATTCAGTGAATCCCGATGGAAGGAGTG | MNTISVEAGRSGYNSVNPDGRSG |
| | | GCTACAATTCAGTCAATCCCGATGGAAGGAGTGGTTACAATTCAGTCAATCCGAATGGGAGGGGTGGC | YNSVNPDGRSGYNSVNPNGRGGY |
| | | TACAATTCGGTCAATCCCAATGACGGCGGTGGCAGCCCATAG | NSVNPNDGGGSP* |
| | | SEQ ID NO: 75 | SEQ ID NO: 76 |
| 39 | Xa21_Os02g0125300 | ATGGACGCCTTCTACTCGACCTCGTCGGCGTACGGCGCGGCGGCGAGCGGCTGGGGCTACGACTCGCT | MDAFYSTSSAYGAAASGWGYDSL |
| | | GAAGAACTTCCGCCAGATCTCCCCCGCCGTCCAGTCCCACCTCAAGCTCGTTTACCTGACACTATGCG | KNFRQISPAVQSHLKLVYLTLCV |
| | | TCGCGCTGGCTGCGTCGGCGGTGGGCGCATACCTGCACGTCGCCTTGAACATCGGCGGGATGTTGACC | ALAASAVGAYLHVALNIGGMLTM |
| | | ATGCTCGGGTGCGTGGGGAGCATCGCCTGGTTGTTCTCGGTGCCTGTCTATGAGGAGAGGAAGAGGTT | LGCVGSIAWLFSVPVYEERKRFG |
| | | TGGGATTCTCTTGGCCGCTGCCCTGCTGGAAGGGGCTTCAGTTGGGCCTCTGATCAAGCTTGCTGTAG | ILLAAALLEGASVGPLIKLAVDF |
| | | ACTTTGACTCAAGCATTCTCGTAACAGCATTTGTTGGAACTGCCATTGCGTTTGGGTGCTTCACTTGC | DSSILVTAFVGTAIAFGCFTCAA |
| | | GCTGCCATTGTTGCCAAGCGTAGGGAGTACCTCTACCTTGGTGGTTTGCTCTCTTCTGGCCTCTCCAT | IVAKRREYLYLGGLLSSGLSILL |
| | | CCTGCTCTGGCTGCAGTTTGCCGCATCCATCTTTGGCCACTCCACCGGCAGCTTCATGTTTGAGGTTT | WLQFAASIFGHSTGSFMFEVYFG |
| | | ACTTTGGCCTGTTGATCTTCCTGGGGTACATGGTGTATGACACGCAGGAGATCATCGAGAGGGCTCAC | LLIFLGYMVYDTQEIIERAHHGD |
| | | CACGGTGACATGGACTACATCAAGCACGCACTCACCCTCTTCACTGACTTCGTGGCCGTCCTTGTCCG | MDYIKHALTLFTDFVAVLVRILV |
| | | GATCCTCGTCATCATGCTCAAGAACGCGTCTGACAAGTCGGAGGAGAAGAAGAGGAAGAAGAGGTCTT | IMLKNASDKSEEKKRKKRS* |
| | | GA SEQ ID NO: 77 | SEQ ID NO: 78 |
| 40 | Xa21_Os02g0134300 | ATGGGCAAGAGGAAGTCCAGAGCAAAACCACCTCCCAAGAAGAGAATGGACAAGCTTGATACTGTCTT | MGKRKSRAKPPPKKRMDKLDTVF |
| | | TTGCTGTCCATTCTGCAACCACGGAAGTAGTGTTGAGTGTCGCATTGATCTAAAGAACTTAATCGGCG | CCPFCNHGSSVECRIDLKNLIGE |
| | | AGGCCTCTTGCAGAATTTGTTTGGAAACTTTTAGCACAGCTGTTAATGCTCTGACTGAACCCATCGAC | ASCRICLETFSTAVNALTEPIDI |
| | | ATATACAGCGAATGGATCGACGAATGCGAGCGCGTGAACAACCCTGAGGAGGACAACGCCAACCACTA | YSEWIDECERVNNPEEDNANHYE |
| | | TGAAGATGACAATGCCAGCCGCTACCGCTACGACGAAGAAGAATAG | DDNASRYRYDEEE* |
| | | SEQ ID NO: 79 | SEQ ID NO: 80 |
| 41 | Xa21_OSJNBa0023I17.12 | ATGGGTTGTTTTTGTATATTTGGCAAGAGAAGGGCAACCCGACAGCAAAGTTCTCAGCATAATGATGA | MGCFCIFGKRRATRQQSSQHNDD |
| | | CCCCTCTGGTGATACGAATATAACAAAATTCACTTACAAGGAGCTTTCAAGGGTTACTGAAAATTTTA | PSGDTNITKFTYKELSRVTENFS |
| | | GCCCGTCTAATAAGATTGGTGAGGGAGGTTTTGGATCTGTGTATAAGGGAATGCTAAGGAATGGAAAG | PSNKIGEGGFGSVYKGMLRNGKL |
| | | CTTGTTGCCGTCAAGGTGCTATCTTTAGAGTCAAGACAGGGAGCCAAGGAATTTCTGAACGAACTCAT | VAVKVLSLESRQGAKEFLNELMA |
| | | GGCAATTTCAAACGTATCTCATGAAAATCTTGTCAAGCTTTATGGCTATTGTGTGGAAGGAAACCAAA | ISNVSHENLVKLYGYCVEGNQRI |
| | | GAATCCTTGTCTACAATTATCTTGAAAATAATAGCCTTGCACAAACACTTTTGGGTTATGGCCACAGC | LVYNYLENNSLAQTLLGYGHSNS |
| | | AACAGCAACATCCAGTTCAACTGGGCAACTCGAGTAAATATTTGTGTTGGTATCGCCCGTGGACTAAC | NIQFNWATRVNICVGIARGLTYL |
| | | ATACCTCCATGAAGTTGTAAATCCCCACATTGTTCACCGGGATATCAAAGCAAGCAATATACTTCTAG | HEVVNPHIVHRDIKASNILLDKD |
| | | ATAAAGATCTTACGCCGAAAATATCTGATTTCGGTTTAGCAAAGCTTTTGCCTCCAGATGCATCACAT | LTPKISDFGLAKLLPPDASHVST |
| | | GTTAGCACAAGGGTTGCTGGAACATTAGGTTACTTGGCTCCAGAGTATGCCATTCGAGGACAAGTGAC | RVAGTLGYLAPEYAIRGQVTRKS |
| | | ACGGAAGTCAGATGTTTATAGTTTTGGTGTTCTGTTACTAGAAATAGTTAGTGGGAGATCCAACACCA | DVYSFGVLLLEIVSGRSNTNTRL |
| | | ATACAAGATTACCCTATGAAGATCAGATACTTCTTGAAAGGACATGGGTGCACTATGAAGAGGGTGAT | PYEDQILLERTWVHYEEGDLEKI |
| | | TTGGAGAAAATCATAGACGCTTCTTTGGGTGATGACTTGGATGTTGCACAAGCCTGTATGTTCCTGAA | IDASLGDDLDVAQACMFLKIGLL |
| | | AATTGGGCTTTTGTGTACACAAGATGTCACGAAACATCGACCCACAATGTCGATGGTTGTCCGCATGC | CTQDVTKHRPTMSMVVRMLTGEM |
| | | TAACAGGTGAAATGGATGTTGAGCTGGCGAAGATCAGCAAGCCCGCAATAATCAGTGACTTTATGGAT | DVELAKISKPAIISDFMDLKVRS |
| | | CTTAAGGTCAGGAGCATGAGGAAAGAAGTGGACATAGTTTCATCCTCAACATCCACATTGCTATCTTC | MRKEVDIVSSSTSTLLSSIMAHS |
| | | CATCATGGCACACTCTTCTCCTTTGTTGTCGCAAGAGACAACAGAAGCCTCCATGACATTCACTGCGA | SPLLSQETTEASMTFTAISDRE* |
| | | TATCAGATCGTGAGTGA SEQ ID NO: 81 | SEQ ID NO: 82 |
| 42 | Xa21_Os02g0181300 | ATGGATCCGTGGATTAGCAGCCAGCCTTCGCTGAGCCTGGACCTCCGCGTCGGGCTGCCGGCGACGGC | MDPWISSQPSLSLDLRVGLPATA |
| | | GGCCGTCGCCATGGTTAAGCCCAAGGTGCTCGTCGAGGAGGACTTCTTTCACCAGCAGCCTCTCAAGA | AVAMVKPKVLVEEDFFHQQPLKK |
| | | AAGACCCAGAGGTTGCGGCGCTGGAGGCGGAGCTGAAGCGGATGGGCGCGGAGAACCGGCAGCTGAGC | DPEVAALEAELKRMGAENRQLSE |
| | | GAGATGCTGGCGGCGGTGGCGGCCAAGTACGAGGCGCTGCAGAGCCAGTTCAGCGACATGGTCACCGC | MLAAVAAKYEALQSQFSDMVTAS |
| | | CAGCGCCAACAACGGCGGCGGCGGCGGCGGCAACAACCCGTCGTCCACCTCCGAGGGCGGCTCCGTCT | ANNGGGGGGNNPSSTSEGGSVSP |
| | | CGCCGTCGAGGAAGCGCAAGAGCGAGAGCCTCGACGACTCTCCCCCGCCGCCGCCGCCGCCGCACCCA | SRKRKSESLDDSPPPPPPPHPHA |
| | | CACGCGGCGCCGCACCACATGCACGTCATGCCCGGCGCCGCCGCCGCCGGCTACGCCGACCAGACCGA | APHHMHVMPGAAAAGYADQTECT |
| | | GTGCACCTCCGGCGAGCCCTGCAAGCGCATCCGCGAGGAGTGCAAGCCCAAGATCTCCAAGCTCTACG | SGEPCKRIREECKPKISKLYVHA |
| | | TCCACGCCGACCCATCCGACCTCAGCCTGGTGGTGAAAGATGGGTACCAATGGAGGAAGTATGGTCAG | DPSDLSLVVKDGYQWRKYGQKVT |
| | | AAGGTCACCAAGGACAACCCCTGCCCAAGAGCCTACTTCAGATGCTCATTTGCTCCGGCCTGCCCTGT | KDNPCPRAYFRCSFAPACPVKKK |
| | | CAAGAAGAAGGTTCAGAGAAGCGCGGAGGACAACACGATCCTCGTGGCGACGTACGAGGGGGAGCACA | VQRSAEDNTILVATYEGEHNHGQ |
| | | ACCACGGCCAGCCGCCGCCGCCGCTGCAGTCGGCGGCGCAGAACAGCGACGGCTCCGGCAAGAGCGCC | PPPPLQSAAQNSDGSGKSAGKPP |
| | | GGGAAGCCACCCCATGCGCCGGCGGCGGCGCCGGCGCCGGCGCCGGTGGTGCCGCACCGTCAGCACGA | HAPAAAPAPAPVVPHRQHEPAVV |
| | | ACCGGCCGTCGTCAACGGCGAGCAGCAGGCCGCGGCGGCGTCGGAGATGATCAGGCGGAACCTGGCCG | NGEQQAAAASEMIRRNLAEQMAM |
| | | AGCAGATGGCGATGACGCTGACGCGTGACCCAAGCTTCAAGGCGGCGCTCGTCACCGCCCTCTCCGGC | TLTRDPSFKAALVTALSGRILEL |
| | | CGCATCCTCGAGCTCTCGCCGACCAAGGATTGA | SPTKD* |
| | | SEQ ID NO: 83 | SEQ ID NO: 84 |
| 43 | Xa21_OsJ_05634 | ATGGCCTGGGAGGGGGTTGTCGGCGCGGTTGATGCAGCTAGAATGTCGAAGCAACAAGTAGTGGAAGC | MAWEGVVGAVDAARMSKQQVVEA |
| | | AGAGCACCTGATGAAAGCTCTTCTGGAGCAGAAGGATGGTTTAGCACGCAGAATATTTTCGAAAGCTG | EHLMKALLEQKDGLARRIFSKAG |
| | | GAATAGATAACACATCTGTCCTGCAAGCTACTGATGAGTTCATCTCTAGACAGCCAAAGGTTGTTGGC | IDNTSVLQATDEFISRQPKVVGD |
| | | GATACAAGTGGACCGATCATAGGGTCAAGCTTTGTATCAATTTTGGATAATGCAAGGAAGCATAAGAA | TSGPIIGSSFVSILDNARKHKKE |
| | | AGAATATGCTGATGAGTTTGTATCTGTTGAGCACATATTGCGAGCATTCACAGAAGATAAGAGGTTTG | YADEFVSVEHILRAFTEDKRFGQ |
| | | GACAACAGCTGTTCAGAGATCTCAAAATTGGGGAGAATGAGTTGAAGGAAGCTATCTCCGCTGTACGT | QLFRDLKIGENELKEAISAVRGS |
| | | GGCAGTCAGCGGGTCACAGATCAGATTGTTTTTCTACAGAGGTATCTCTTTGTCTATCTCTCTATTCA | QRVTDQIVFLQRYLFVYLSIHNL |
| | | CAACTTGAGAGGAGACTCTGCCGATGGCAATGATCCGGAGGGGAAGTACCAGGCTCTAGAGAAGTATG | RGDSADGNDPEGKYQALEKYGID |
| | | GTATTGACATGACAGAATTAGCTCGACGTGGAAAACTGGATCCTGTTATTGGCCGTGATGATGAAGTG | MTELARRGKLDPVIGRDDEVRRC |
| | | CGACGATGCATTCAGATCCTTTGCAGGAGAACTAAGAATAATCCTGTAATTATTGGTGAGCCAGGAGT | IQILCRRTKNNPVIIGEPGVGKT |
| | | TGGCAAAACTGCTATTGCTGAAGGATTGGCTCAACGTATTGTGCGGGGAGATGTTCCTGAACCTTTAC | AIAEGLAQRIVRGDVPEPLQNRK |
| | | AGAATAGAAAGCTTATTTCATTGGACATGGGAGCATTACTTGCTGGGGCTAAATTCCAAGGTCAATTT | LISLDMGALLAGAKFQGQFEERL |
| | | GAAGAGAGACTTAAGGCTGTTCTGAAGGAGGTCACTGCCTCGAATGGGCAAATCATCTTGTTCATTGA | KAVLKEVTASNGQIILFIDEIHT |
| | | TGAGATCCACACTATTGTTGGTGCAGGAGCAGCAGGTGGGGCAATGGATGCTGGTAATTTGCTGAAGC | IVGAGAAGGAMDAGNLLKPMLGR |
| | | CAATGTTAGGCCGGGGTGAACTCCGTTGCATTGGAGCAACAACATTAGATGAGTACAGGAAGTACATT | GELRCIGATTLDEYRKYIEKDAA |
| | | GAGAAGGATGCTGCTCTGGAGCGTAGGTTCCAGCAGGTTTATTGTGGTGAGCCAGCAGTTGAGGATAC | LERRFQQVYCGEPAVEDTISILR |
| | | AATCTCTATATTGCGTGGTCTAAGAGAGCGGTACGAACTGCATCATGGTGTCAAAATATCAGATGGCG | GLRERYELHHGVKISDGALVSAA |
| | | CTCTTGTTTCTGCAGCTGTTTTATCAGATCGCTACATCACTGGACGTTTTTTGCCTGATAAAGCTATT | VLSDRYITGRFLPDKAIDLVDEA |
| | | GACCTAGTTGATGAAGCAGCTGCTAAGCTGAAAATGGAGATAACATCGAAACCTATTGAGTTGGATGA | AAKLKMEITSKPIELDERLSKLE |
| | | GCGACTGAGCAAGCTTGAAGCTGATCTAGAATCTCTCAAGCAGAAGCAGAAAAACCTTTCAGAACATT | ADLESLKQKQKNLSEHWEYEKSL |
| | | GGGAATATGAGAAGTCCTTGATGACCCGCATAAGATCGATCAAGGAAGAGACTGACAGAGTTAACCTG | MTRIRSIKEETDRVNLEIEAAER |
| | | GAGATTGAAGCTGCTGAGAGAGAATATGATTTGAACCGTGCAGCTGAGCTCAAGTACGGAACACTTCT | EYDLNRAAELKYGTLLSLQKQLE |
| | | GTCGCTACAAAAACAGCTTGAAGAGGCTGAGAACAAACTCATGGAATTCCAGCAGTCAGGCAAGTCAA | EAENKLMEFQQSGKSMLREEVTD |
| | | TGCTTCGAGAAGAGGTGACTGATGTTGACATTGCTGAGATTGTTAGCAAGTGGACTGGTATTCCAGTG | VDIAEIVSKWTGIPVSNLQQSEK |
| | | TCAAACCTTCAACAATCTGAAAAGGAAAAGCTACTGCTATTGGAAGATGTACTCCACAAGAGGGTTAT | EKLLLLEDVLHKRVIGQDIAVKS |
| | | TGGCCAAGATATTGCAGTGAAGTCAGTGGCTAATGCAATCCGTCGTTCTAGGGCAGGCCTATCAGACC | VANAIRRSRAGLSDPNRPIASLM |
| | | CTAACCGTCCCATAGCAAGCTTAATGTTTATGGGTCCAACAGGTGTAGGAAAGACCGAACTGGGGAAA | FMGPTGVGKTELGKTLAEFLFNT |
| | | ACACTAGCTGAATTCCTTTTCAACACAGAGAATGCTCTAATACGGATTGATATGAGCGAGTACATGGA | ENALIRIDMSEYMEKHAVSRLVG |
| | | AAAGCATGCAGTCTCCCGTTTGGTTGGAGCCCCTCCTGGATATATTGGTTATGGGGAAGGGGGCCAAC | APPGYIGYGEGGQLTEAVRRRPY |
| | | TGACAGAAGCTGTTCGTCGTAGGCCTTATTCTGTGGTTCTTTTCGATGAAATTGAGAAAGCGCACCAG | SVVLFDEIEKAHQDVFNILLQLL |
| | | GATGTGTTCAACATCTTATTGCAACTTTTGGATGACGGAAGAATAACCGACTCTCAGGGCAGAACAGT | DDGRITDSQGRTVSFTNCVIIMT |
| | | CAGCTTTACTAACTGTGTTATCATCATGACTTCAAACATTGGGTCGTCATTGATTCTTGACACGCTTA | SNIGSSLILDTLRNTSDSKEAVY |
| | | GAAACACATCAGACAGCAAGGAGGCAGTTTATGAAATAATGAAGAAGCAAGTGATTGACATGGCTCGG | EIMKKQVIDMARQSFRPEFLNRI |
| | | CAGTCATTCCGGCCAGAGTTTTTGAATAGGATAGATGAGTACATTGTATTCCAGCCGCTGGACACCAC | DEYIVFQPLDTTEINRIVEIQLN |
| | | AGAGATAAATCGCATCGTGGAGATCCAGCTGAACCGAGTCAAGAACCGGCTGAGGCAACAGAAGATTC | RVKNRLRQQKIHLQYTPEAVEHL |
| | | ATCTGCAGTACACACCAGAAGCTGTGGAGCATCTTGGCTCTCTCGGCTTTGACCCTAACTACGGCGCT | GSLGFDPNYGARPVKRVIQQMVE |
| | | AGGCCTGTGAAGAGGGTGATCCAGCAGATGGTGGAGAACGAGATCGCCCTCAGTGTCCTGAAGGGCGA | NEIALSVLKGDFKEDDTILVDVS |
| | | CTTCAAAGAAGACGACACCATCCTCGTCGACGTGAGTTCCGTGGCCATCGCGAAAGGGCTTGCTCCAC | SVAIAKGLAPQKKLVLQRLENAN |
| | | AGAAGAAGCTTGTCCTCCAGAGGTTAGAGAATGCAAACTTAGAGTTAGTCGCCAATGACTAG | LELVAND* |
| | | SEQ ID NO: 85 | SEQ ID NO: 86 |
| 44 | Xa21_Os02g0267000 | ATGTCCTCCATCCACTTCTTCCCGGCCACCTCCCAGGCCGCCGCCCCGTCGCGCCGCCCCCTCACCAA | MSSIHFFPATSQAAAPSRRPLTK |
| | | ATCCTCCCCAAAACCCCCCGCCGCCGCCACCGCCGCGTTCCACCGCGGCGGAGGCAACGAGCCGGTGC | SSPKPPAAATAAFHRGGGNEPVL |
| | | TCTTCCCGCGCCTCTTCCTCAGGAGGCGTGCCCGGCCCGCCGCGGCGCCGGCCGAGGCGCCGCCGGTG | FPRLFLRRRARPAAAPAEAPPVG |
| | | GGCCCCGACGGCAGCAACGGCGGCGGGGGAGGAGGAGAGGCGGATGGTGGGGGCGGAGGGGACGACGA | PDGSNGGGGGGEADGGGGGDDEE |
| | | GGAGGATGAGGGGACGAGGAAGGGGCTGCTGCCGGAGTGGCTCAGCGTCACGACGGACGACGCCAAGA | DEGTRKGLLPEWLSVTTDDAKTV |
| | | CGGTGCTGGCCGCCATCGCCATCTCGCTCGCCTTCCGCTCCTTCGTCGCCGAGCCGCGCTTCATCCCC | LAAIAISLAFRSFVAEPRFIPSL |
| | | TCGCTCTCCATGTTCCCCACCTTCGACGTCGGCGACCGCATTGTCGCCGAGAAGGTTACATACTACTT | SMFPTFDVGDRIVAEKVTYYFRK |
| | | TAGAAAGCCATGTATAAATGACATAGTAATCTTCAAAAGTCCACCAGTGCTGCAGGAGGTCGGTTATA | PCINDIVIFKSPPVLQEVGYTDN |
| | | CTGACAATGATGTTTTCATCAAACGAATTGTTGCCAGGGAGGGAGATGTTGTTGAGGTTCATAAAGGA | DVFIKRIVAREGDVVEVHKGKLV |
| | | AAACTAGTTGTCAATGGTGAAGTTAGAAATGAAGAGTTCATTCTTGAGCCACCTTCTTATGACATGAA | VNGEVRNEEFILEPPSYDMNPVQ |
| | | CCCAGTGCAAGTACCTGAGAACTCAGTTTTTGTAATGGGAGATAACCGAAACAACAGTTACGATTCAC | VPENSVFVMGDNRNNSYDSHVWG |
| | | ATGTGTGGGGCCCTCTTCCTTCTAAGAACATATTGGGGAGATCCATTTTCCGGTATTGGCCTCCTGGC | PLPSKNILGRSIFRYWPPGRIGS |
| | | CGAATAGGGAGCACTACTACTGATTGCCTCATCCCTGAGACAAATCCAAGCTCGCTTATTGATGTCAA | TTTDCLIPETNPSSLIDVKLAK* |
| | | ACTGGCAAAGTAG SEQ ID NO: 87 | SEQ ID NO: 88 |
| 45 | Xa21_Os02g0327000 | ATGTTGGGGCATCTGGTTGGGCTGGTGAAGGTGCGGGTGGTGAGGGGCGTCAACCTCGCCGTCCGCGA | MLGHLVGLVKVRVVRGVNLAVRD |
| | | CCTCCGCTCCAGCGACCCCTACGTCATCGTCCGCATGGGCAAGCAGAAGTTGAAGACACGAGTCATAA | LRSSDPYVIVRMGKQKLKTRVIK |
| | | AAAAGACTACCAATCCGGAGTGGAACGATGAACTCACCCTCTCGATTGAAGATCCAGCAGTTCCTGTT | KTTNPEWNDELTLSIEDPAVPVR |
| | | AGATTGGAAGTGTATGACAAAGACACATTCATCGATGATGCAATGGGCAATGCGGAGCTGGACATTCG | LEVYDKDTFIDDAMGNAELDIRP |
| | | CCCATTGGTGGAGGTTGTCAAGATGAAGATTGAGGGTGTTGCTGACAACACGGTTGTGAAGAAAGTGG | LVEVVKMKIEGVADNTVVKKVVP |
| | | TACCCAATAGACAGAACTGCCTAGCTGAAGAGAGCACGATATATATCTCTGAGGGGAAGGTGAAGCAA | NRQNCLAEESTIYISEGKVKQDV |
| | | GACGTGGTTCTCAGACTAAGGGATGTGGAATGCGGGGAAATTGAGCTCCAGCTTCAGTGGGTCGACAT | VLRLRDVECGEIELQLQWVDIPG |
| | | CCCAGGTTCTAAGGGTGTATGA | SKGV* |
| | | SEQ ID NO: 89 | SEQ ID NO: 90 |
| 46 | Xa21_Os02g0661100 | ATGGATTTGAGCAATAGCTCACCTGTCATCACCGATCCGGTGGCGATCAGCCAGCCGTTGTTGGGCGG | MDLSNSSPVITDPVAISQPLLGG |
| | | CCTGCCTTCAAATCTGATGCAGTTTTCAGTCATGCCCGGTGGCTACTCCAGCTCTGGCATGAACGTTG | LPSNLMQFSVMPGGYSSSGMNVG |
| | | GTGTCAGTAGGCTCAAAATCGAGGAAGTCCTTGTCAATGGACTGCTTGATGCCATGAAATCCTCGTCA | VSRLKIEEVLVNGLLDAMKSSSP |
| | | CCTCGCAGGAGGCTGAATGTAGCATTTGGCGAGGACAATTCATCTGAAGAAGAAGACCCTGCTTACAG | RRRLNVAFGEDNSSEEEDPAYSA |
| | | CGCTTGGATGGCAAAATGTCCTTCTGCTTTGGCTTCCTTCAAGCAAATTGTAGCCAGTGCACAAGGGA | WMAKCPSALASFKQIVASAQGKK |
| | | AGAAGATTGCTGTGTTCCTAGACTACGACGGCACGCTGTCGCCTATTGTGGATGATCCTGACAAAGCA | IAVFLDYDGTLSPIVDDPDKAVM |
| | | GTGATGTCTCCCGTGATGAGAGCTGCTGTGAGAAATGTTGCGAAGTACTTCCCCACTGCAATTGTCAG | SPVMRAAVRNVAKYFPTAIVSGR |
| | | CGGAAGGTCCCGCAATAAGGTGTTTGAATTTGTAAAACTGAAGGAGCTTTATTATGCTGGAAGCCATG | SRNKVFEFVKLKELYYAGSHGMD |
| | | GTATGGACATAATGGCATCTTCAGCAAATCATGAGCATAGTGCTGAAAAGAGCAAACAGGCCAATCTC | IMASSANHEHSAEKSKQANLFQP |
| | | TTCCAACCTGCACGCGAGTTTCTGCCAATGATCGATGAGGTTACCAAGTCCCTCTTGCAAGTTGTCAG | AREFLPMIDEVTKSLLQVVSGIE |
| | | TGGAATTGAAGGTGCAACTGTTGAGAACAACAAATTCTGCGTTTCTGTACATTATCGCAACGTTGCAG | GATVENNKFCVSVHYRNVAEKRW |
| | | AGAAGCGTTGGAAACTGGTCGCACGGCTCGTAAACGAAGTGCTGGAGGCTTTTCCTCGTCTCAAAGTA | KLVARLVNEVLEAFPRLKVTNGR |
| | | ACCAATGGACGAATGGTTTTAGAGGTTCGTCCGGTGATCGACTGGGACAAGGGAAAGGCTGTGGAGTT | MVLEVRPVIDWDKGKAVEFLLQS |
| | | TCTGCTCCAGTCACTCGGGCTAGATGACTCTGAAAATGTGATTCCCATCTACATTGGAGACGACAGAA | LGLDDSENVIPIYIGDDRTDEDA |
| | | CTGACGAAGACGCTTTCAAGGTACTTCGACAGCGAAACTGCGGCTATGGAATACTAGTTTCACAGGTT | FKVLRQRNCGYGILVSQVPKETE |
| | | CCCAAGGAAACTGAAGCCTTCTACTCGCTAAGAGACCCATCTGAAGTGATGGAGTTCCTCAATTTCTT | AFYSLRDPSEVMEFLNFLVRWKK |
| | | GGTGAGATGGAAGAAGCACTCAGTGTGA | HSV* |
| | | SEQ ID NO: 91 | SEQ ID NO: 92 |
| 47 | Xa21_Os02g0664000 | ATGCCGTCTCGCACCGCCCCGTTCATCTCTCGCCTCCGGCTCCTCCGAACCGCCGCCGCCCTCTCCCC | MPSRTAPFISRLRLLRTAAALSP |
| | | GTCCTCGTCCTCCGCGCCGCCGCGGCACATCCCCCGCATCCTCCGCGCTAGCCCTGTCGGTGCGCCTC | SSSSAPPRHIPRILRASPVGAPH |
| | | ACCCGCCGCGCGTCTCCGCAGCCGTCTCGCCGCTGGTCCGTCCGGTCGCCGCCGGGTTCGCGCTGTTC | PPRVSAAVSPLVRPVAAGFALFS |
| | | AGCATGGCCACCGCCGCCTCCTCCGCCGCATCCGTCCACGACTTCACCGTCAAGGATGCAAGTGGCAA | MATAASSAASVHDFTVKDASGKD |
| | | AGATGTGGACCTGAGCACCTACAAGGGGAAAGTCCTCCTTATCGTCAATGTTGCATCTCAGTGTGGCT | VDLSTYKGKVLLIVNVASQCGLT |
| | | TGACCAATTCCAACTACACGGAGCTGAGCCAGTTGTATGAGAAGTACAAGGACCAGGGTTTTGAGATC | NSNYTELSQLYEKYKDQGFEILA |
| | | CTTGCTTTCCCATGCAACCAGTTTGGTGGACAGGAACCTGGCACTAATGAGGAGATTGTCCAATTTGC | FPCNQFGGQEPGTNEEIVQFACT |
| | | TTGCACCCGCTTCAAGGCCGAGTATCCAATTTTTGATAAGGTTGATGTTAATGGTGACAACACTGCAC | RFKAEYPIFDKVDVNGDNTAPIY |
| | | CCATCTACAAGTTTCTGAAGTCCAGCAAAGGTGGTCTTTTCGGTGACAATATCAAATGGAACTTCTCC | KFLKSSKGGLFGDNIKWNFSKFL |
| | | AAGTTCTTGGTCGACAAAGAGGGGCGTGTTGTGGAGCGCTATGCGCCAACTACTTCTCCACTCAGCAT | VDKEGRVVERYAPTTSPLSMEKD |
| | | GGAGAAGGACATCAAGAAGCTGCTTGGAAGTTCTTAA | IKKLLGSS* |
| | | SEQ ID NO: 93 | SEQ ID NO: 94 |
| 48 | Xa21_Os02g0671300 | ATGCGTTTGCACGCCGGCGCAGTGCAACTCCAGTATTTCATGCCCCAGCAGGGAGCCGCCGCCGCCGC | MRLHAGAVQLQYFMPQQGAAAAA |
| | | CGCCGCCGACCACCACCAGGCCGACTCGGCTACCGCGTGCAGCGCCTCCACTTCGCCGGCCGCCGCCG | AADHHQADSATACSASTSPAAAA |
| | | CCGCCACCATGTGGGAGTATCATCACCAGCTGTCGACGCACGCGGCCTTGCAGCCCTCGTCCTCTTTT | ATMWEYHHQLSTHAALQPSSSFP |
| | | CCCTACAGTTACTGGAGCCCCTACTCCGGGTCGACGGCGCTCGCCGGCTCGGCCTTCGCTGCCGACTC | YSYWSPYSGSTALAGSAFAADSS |
| | | CTCCTCGTCGTCGACTGACGTCATGCGTCTCCCGGCCGCCGGCGAGCACGCCCACGGACACGGCTGGA | SSSTDVMRLPAAGEHAHGHGWSH |
| | | GCCACGGCGAACTAAGCAACAGCACCACCGGCGGCTGCTACAGGGAGAACTTCCTCGATCTGCTCGCG | GELSNSTTGGCYRENFLDLLASK |
| | | TCGAAGAACGTGACGCCGGAAATGTTCGAGGAAGTCCCCGCCGCCGAGCACTACAACGTCGCGCCGGC | NVTPEMFEEVPAAEHYNVAPAGT |
| | | GGGGACGACCCTGACGACGGCACGGTCGTCGTTCGATCACGCTCGCTCCGACGTCTCGCCGATCAAGT | TLTTARSSFDHARSDVSPIKYEI |
| | | ACGAGATCGCCGGCTCGCCGTTGTACTTGGGTGGCACTAACACCGTCCTCCAGGTCCAGGACATGACC | AGSPLYLGGTNTVLQVQDMTMMS |
| | | ATGATGAGTAGCACGCCAGCATGCTACGGCAAACACCACCACCACCATCATCAGCTGACGAAGGAAGG | STPACYGKHHHHHHQLTKEGSCS |
| | | CAGCTGCAGCCATCAGCAGCAGGAGCAGCACGAGCTTGCGATTAGCCCCATGGCCTCATTTCTGCAGC | HQQQEQHELAISPMASFLQQISS |
| | | AAATAAGCTCCGGCAGTGCTAGTGTTGGCGTGCACAACAGTAGCCTTGATTATTCAGGCTTAGGAGAT | GSASVGVHNSSLDYSGLGDQPDK |
| | | CAGCCTGACAAGATTTGCTGCCAGGACGGCCGGGAAATGGAGGCTAGTCCTTTTAGCATGAGGAGCTT | ICCQDGREMEASPFSMRSLPDLG |
| | | GCCGGATCTTGGGTCATTCGCCGGCTACACGCCGGCCATCGAGTCGACGTCGGTGCAACCGTACATGA | SFAGYTPAIESTSVQPYMRCANS |
| | | GATGCGCCAATTCGTCTGACAGCAATCGACAAGAACAGGAGACTGTGCCGGCAAGGAGTAGTAGCAGC | SDSNRQEQETVPARSSSSGSGAA |
| | | GGCAGTGGAGCGGCGGCGACTGATCGTAAGAAGAGGAAGTTAGAGGAAAGGCAGGAAAGCACTGTCAA | ATDRKKRKLEERQESTVKKSKQE |
| | | GAAGTCCAAGCAAGAGGCTTCCAAAGCATCACCTCCTAAGCAACCAGTGCCTAAAGTAAAGATAGGGG | ASKASPPKQPVPKVKIGEKITAL |
| | | AGAAGATCACAGCACTTCAGCAAATCGTTTCGCCGTTTGGGAAGACGGATACAGCATCGGTACTGTTT | QQIVSPFGKTDTASVLFETIKYI |
| | | GAAACGATCAAGTATATCAAGTTTCTGCACGAACAAGTACAGTTGCTAAGTGAGCCGTACACGAACTC | KFLHEQVQLLSEPYTNSSRSNKQ |
| | | CAGCAGGAGCAACAAGCAGGGTAACAGCGTTCCATGGGGAGATCAAGCAGAAGCGAGCAAGGGAGAGA | GNSVPWGDQAEASKGETTEHDLR |
| | | CGACGGAGCATGACCTGAGGAACAGGGGGCTTTGCTTGGTGCCTGTCTCGTGGACGCCCGAAGTGTAC | NRGLCLVPVSWTPEVYRDGNAMD |
| | | CGGGACGGCAACGCGATGGACTATTGGACGCCGGCGTACCGGGGCTGCCTGTACCGGTGA | YWTPAYRGCLYR* |
| | | SEQ ID NO: 95 | SEQ ID NO: 96 |
| 49 | Xa21_Os02g0677300 | ATGGACGTTTCTGCTGCGCTCAGCAGCGACTACTCGTCGGGGACGCCGTCGCCGGTGGCGGCCGACGC | MDVSAALSSDYSSGTPSPVAADA |
| | | CGACGACGGCTCCTCCGCCTACATGACGGTGTCGTCGGCGCCGCCCAAGCGGCGGGCGGGGCGGACCA | DDGSSAYMTVSSAPPKRRAGRTK |
| | | AGTTCAAGGAGACGCGGCACCCCGTGTTCAAGGGCGTGCGCCGGAGGAACCCCGGGAGGTGGGTGTGC | FKETRHPVFKGVRRRNPGRWVCE |
| | | GAGGTGCGCGAGCCGCACGGCAAGCAGCGGATATGGCTCGGGACGTTCGAGACGGCCGAGATGGCGGC | VREPHGKQRIWLGTFETAEMAAR |
| | | GCGCGCGCACGACGTCGCCGCGCTCGCGCTCCGCGGCCGCGCCGCCTGCCTCAACTTCGCCGACTCGC | AHDVAALALRGRAACLNFADSPR |
| | | CGAGGCGCCTCCGCGTCCCGCCCATTGGCGCAAGCCACGACGACATACGGAGGGCGGCGGCTGAGGCG | RLRVPPIGASHDDIRRAAAEAAE |
| | | GCCGAGGCATTCCGGCCGCCACCAGATGAGAGCAATGCGGCCACCGAGGTGGCAGCCGCCGCATCGGG | AFRPPPDESNAATEVAAAASGAT |
| | | CGCCACCAATTGGAATGCCGAACAGTTCGCCTCCCACCCGTACTACGAGGTCATGGACGATGGGCTGG | NWNAEQFASHPYYEVMDDGLDLG |
| | | ACTTGGGGATGCAGGGCTACCTCGACATGGCGCAAGGGATGCTCATTGACCCGCCTCCAATGGCCGGT | MQGYLDMAQGMLIDPPPMAGDPA |
| | | GATCCTGCCGTAGGTGGCGGGGAAGACGACAACGATGGCGAGGTCCAGCTATGGAGCTACTGA | VGGGEDDNDGEVQLWSY* |
| | | SEQ ID NO: 97 | SEQ ID NO: 98 |
| 50 | Xa21_Os02g0681200 | ATGGGCTTCCCGGTGGGCTACTCGGAGCTGCTGCTCCCGAGGCTGCTGCTCCAGGTGCTCCTCCTCCT | MGFPVGYSELLLPRLLLQVLLLL |
| | | CGGCCACCTCCATCGCTTCCTCCTCTGGGCCTTCCACGCAGTCGGCCTCGGCGACCTCATCGACAACC | GHLHRFLLWAFHAVGLGDLIDNP |
| | | CGCCGGGGCTGGCGGCCACGGAGCAGGACCTGATGCTGCAGGGGCGCGGCGGCGGGATGGCGGAGGGT | PGLAATEQDLMLQGRGGGMAEGW |
| | | TGGGCGTCGTCGTCGTCGTCGGCGCTCCAGCACCGCCGGCCCGAGTTCAGGGCGATTCCGCCGATGGC | ASSSSSALQHRRPEFRAIPPMAI |
| | | CATCGAGGAGGCCCTCCCCGTGGTGAGGTTCGACGAGCTGGTGGCGTCCGCCCCCGCCGCGGTGTGCG | EEALPVVRFDELVASAPAAVCGG |
| | | GTGGCGGCGACTGCGCGGTCTGCCTCAGCGGCATCTGCGGCCGCGACGAGGTGCGGCGGCTGTCCAAC | GDCAVCLSGICGRDEVRRLSNCR |
| | | TGCCGCCACGTCTTCCACCGCGGCTGCCTCGACCGCTGGATGGCCCACGAGCAGCGCACCTGCCCGCT | HVFHRGCLDRWMAHEQRTCPLCR |
| | | CTGCCGCGCGCCGCTCATCCCCGACGAGCTCTTGCCCGCCGCCTCCGCCCTGCCTGACCCCTCCGACT | APLIPDELLPAASALPDPSDYDL |
| | | ACGACCTCTCGTACTACCCATCCCCGCTGCCACTGGCGCCCACCCCGACGCTGCTGCGACCACACGAG | SYYPSPLPLAPTPTLLRPHELLL |
| | | CTGCTGCTCAACGGCTTGGGCGGTTTCCAGTGA | NGLGGFQ* |
| | | SEQ ID NO: 99 | SEQ ID NO: 100 |
| 51 | Xa21_Os02g0682300 | ATGGGGTTCCCTCTGGTGTGCTACTGCATGGCGATCCCCAAGCCGCTCATCGCCCTGGCCAAGCTCCT | MGFPLVCYCMAIPKPLIALAKLL |
| | | CGCCGCCATCAGGGAGGCCCTCCAGCTGATGCTCTTCGTCGTCGGGATCTGCCACCACCCGGAGCGAT | AAIREALQLMLFVVGICHHPERS |
| | | CGGGCCGCCCGGCTGCCGTCGACGCCCCGCTGCCCGACGAGGTGAAGGACCGCCTCCCGCCCCTCGAG | GRPAAVDAPLPDEVKDRLPPLEF |
| | | TTCGCCCAGCTGCTCGCGGCCTCGGAGCACGGCTGTCACGGCTGCGACGACGACGAGGCGGTGGCGGG | AQLLAASEHGCHGCDDDEAVAGC |
| | | GTGCATCGTGTGCCTGGAGAGGCTGGAGGCGGATGACGTGGTGCGGCGGCTGGGCAACTGCGCGCACG | IVCLERLEADDVVRRLGNCAHAF |
| | | CGTTCCACCGCGGCTGCATCGACCGGTGGATCGACCTCGGCCGGTTGACGTGCCCGCTGTGCCGCTCC | HRGCIDRWIDLGRLTCPLCRSNL |
| | | AACCTGCTGCCGCGCGCGCGCCCCGCCGACGGCCCGCGCGGGCGGCTGGGCCGCCTCGCCACCCGCCT | LPRARPADGPRGRLGRLATRLTG |
| | | CACGGGCGTCGTCTGGTGA | VVW* |
| | | SEQ ID NO: 101 | SEQ ID NO: 102 |
| 52 | Xa21_Os02g0703600 | ATGCCCCTGCGTGATGGTGTCCAGCCCGGAGGCGGCGCGGTTCGTGCTGGTGACGCAGGCGCACCTCT | MPLRDGVQPGGGAVRAGDAGAPL |
| | | TCAAGCCCACCTTCCCGGCGAGCAAGGAGCGGATGCTGGGTCCCCAGGCCATCTTCTTCCAGCAGGGC | QAHLPGEQGADAGSPGHLLPAGR |
| | | GACTACCACGCCCACCTCCGCCGCATCGTCTCCCACGCCTTCTCCCCCGAGTCCATCCGCGCCTCCGT | LPRPPPPHRLPRLLPRVHPRLRP |
| | | CCCCGCCATCGAGGCCATCGCGCTCCGCTCCCTCCACTCCTGGGACGGCCAGTTCGTCAACACCTTCC | RHRGHRAPLPPLLGRPVRQHLPR |
| | | AAGAGATGAAGACTTACGCGCTGAATGTGGCATTGCTGTCCATCTTCGGGGAGGAGGAGATGCGCTAC | DEDLRAECGIAVHLRGGGDALHR |
| | | ATCGAGGAGCTGAAGCAGTGCTACCTGACGCTGGAGAAGGGGTACAACTCGATGCCGGTGAACCTGCC | GAEAVLPDAGEGVQLDAGEPAGH |
| | | GGGCACCCTGTTCCACAAGGCCATGAAGGCCCGGAAGCGGCTGGGCGCCATTGTGGCCCACATCATCT | PVPQGHEGPEAAGRHCGPHHLGQ |
| | | CGGCCAGGCGCGAGCGGCAACGCGGGAGCGACCTGCTGGGGTCGTTCGTGGACGGCCGCGAGGCCCTC | ARAATRERPAGVVRGRPRGPHRR |
| | | ACCGACGCCCAGATCGCCGACAACGTCATCGGCGTCATCTTCGCCGCCCGCGACACCACCGCCAGCGT | PDRRQRHRRHLRRPRHHRQRPHL |
| | | CCTCACCTGGATGGTCAAGTTCCTCGGCGACCACCACGCCGTCCTCAAGGCCGTCACCGAAGAGCAGC | DGQVPRRPPRRPQGRHRRAAADC |
| | | TGCAGATTGCCAAGGAGAAAGAGGCGTCGGGCGAGCCGCTGTCATGGGCGGACACGCGGCGGATGAAG | QGERGVGRAAVMGGHAADEDDEP |
| | | ATGACGAGCCGGGTCATCCAGGAGACGATGAGGGTGGCGTCCATCCTCTCCTTCACCTTCAGGGAGGC | GHPGDDEGGVHPLLHLQGGRGGR |
| | | CGTGGAGGACGTGGAATACCAAGGGTACCTGATCCCCAAGGGCTGGAAAGTGCTACCTCTGTTCCGCA | GIPRVPDPQGLESATSVPQHPPQ |
| | | ACATCCACCACAACCCCGCCCACTTCCCCTGCCCGGAAAAGTTCGACCCGTCCCGGTTCGAGGTCAGC | PRPLPLPGKVRPVPVRGQHHEPT |
| | | ATCACGAACCCACTCTTCCGTGTTTTTGTTCCCTTCCCTCCCTTTCCTTTCCCGGTGCGGCCGACTTC | LPCFCSLPSLSFPGAADFLAKSV |
| | | CTAGCCAAGTCGGTCCGCGGTTTGCGAGCAGTGGCCGGTATGGGTTTTCCTGACCCCGCGTCCGTCCC | RGLRAVAGMGFPDPASVPSLLQV |
| | | GTCTCTGTTGCAGGTGGCGCCCAAGCCCAACACGTTCATGCCGTTCGGGAACGGGACCCACTCGTGCC | APKPNTFMPFGNGTHSCPGNELA |
| | | CGGGCAACGAGCTCGCCAAGCTGGAGATGCTCGTGCTCTTCCACCACCTCGCCACCAAGTACAGGTGG | KLEMLVLFHHLATKYRWSTSKSE |
| | | TCCACGTCCAAGTCCGAGAGCGGCGTCCAGTTCGGCCCCTTCGCGCTGCCGCTCAACGGCCTCCCCAT | SGVQFGPFALPLNGLPMSFTRKN |
| | | GAGCTTCACCCGCAAGAACACCGAGCAGGAGTGA | TEQE* |
| | | SEQ ID NO: 103 | SEQ ID NO: 104 |
| 53 | Xa21_Os02g0704300 | ATGATTAGGGAAGTACTCTCTGAGGCACAGGTTGTGCTTTCTACTAACACAGGGGCAGCCGATCCACT | MIREVLSEAQVVLSTNTGAADPL |
| | | TATCAGGAGAACATGTTGTTTTGACTTGGTAATCATAGATGAAGCAGGGCAAGCAATAGAACCCTCCT | IRRTCCFDLVIIDEAGQAIEPSC |
| | | GCTGGATTCCCATATTGCAGGGAAAGCGTTGCATTCTCGCTGGTGATCATTGCCAGCTTGCACCAGTA | WIPILQGKRCILAGDHCQLAPVI |
| | | ATTTTGTCAAGAAAGGCCTTAGATGGAGGGCTTGGTAAATCTTTGTTGGAAAGAGCTTCGTCATTGCA | LSRKALDGGLGKSLLERASSLHN |
| | | CAATGGATTACTGACAACAAGGTTGACAGTGCAGCACAGAATGAATGACTCAATAGCTAGTTGGGCAT | GLLTTRLTVQHRMNDSIASWASK |
| | | CTAAAGAGATGTATCATGGACTGCTCAAATCTTCTCATTCTGTTGCTTCACAAACTCTTGCTGACTCT | EMYHGLLKSSHSVASQTLADSPV |
| | | CCAGTTGTGAAGGCTACCTGGATAACACGGTGCCCACTGCTTTTACTTGATACTCGAATGCCATATGG | VKATWITRCPLLLLDTRMPYGAL |
| | | GGCCCTGGACACTGGTTGTGGGGAACAAATAGACCTTTCTGGTACAGGCTCATTTTATAATGATGGAG | DTGCGEQIDLSGTGSFYNDGEAD |
| | | AGGCAGATATTGTGACACAACATGTTCTCAACCTTGTACATTGTGGAGTATCTCCAACAGCGATAGCC | IVTQHVLNLVHCGVSPTAIAVQS |
| | | GTTCAATCACCCTACATTGCTCAAGTGCAGTTGTTAAGAGAGAGGCTAGAAGAATATCCAGGGCTTTC | PYIAQVQLLRERLEEYPGLSGVE |
| | | TGGGGTTGAGGTTTCAACCATAGATAGCTTTCAAGGGAGGGAAGCTGATGCAGTTGTCATATCGATGG | VSTIDSFQGREADAVVISMVRSN |
| | | TTCGATCAAACCCACTGGGAGCGGTAGGTTTCCTTGGTGACAGCAGACGCATGAATGTGGCTATTACA | PLGAVGFLGDSRRMNVAITRACR |
| | | AGGGCATGCCGGCATGTCACCGTGGTATGTGACACCTCTACTATCTGTCACAGCACCTTCCTGGCAAG | HVTVVCDTSTICHSTFLARLLRH |
| | | GCTCCTTCGTCATATCAGGCGATATGGGCAAGTGAAACATGTAGTGCCTAGTTCTTTGGATGGGGTGT | IRRYGQVKHVVPSSLDGVSGLGF |
| | | CTGGCCTTGGCTTCAGTCAACCCACTCTGCCGTCCATCAGTTAG | SQPTLPSIS* |
| | | SEQ ID NO: 105 | SEQ ID NO: 106 |
| 54 | Xa21_Os02g0730800 | ATGGACGCCGCCCGCGCCTCCCTCCTCTTGGCCGGCGGCCTCGCCGTATCCACCTCCACCTCCGCCGT | MDAARASLLLAGGLAVSTSTSAV |
| | | CGCCACTGCCGCCCAAACCGTCTCGATTCCTCACCTATCGCCGCACACCCGCCAACGGCGACAGCGCC | ATAAQTVSIPHLSPHTRQRRQRR |
| | | GCTTCCTCCGCCTGGCCTCCGCTGCGGCGTCGTCTCCCCCGCCGCTCCCCGCTGCTTCCGCGCAGCCG | FLRLASAAASSPPPLPAASAQPH |
| | | CATTGCTCTAGGTGGGTCGTGGTGATGGAGAGACCCCCCGCGCCAGCGGGAGGCGGCGAGGTGTCCCG | CSRWVVVMERPPAPAGGGEVSRA |
| | | TGCGGAGGCCGTCGACCACTACGTCGCCACACTGGCCAGGGTATTGGGGAGCCAGGAGGAAGCACAGA | EAVDHYVATLARVLGSQEEAQMR |
| | | TGCGCATATACGATGCTTCGTGGGATGGGAGCTACGAGTTCAGCTGCGAGATCGACGATGAAGCGTCA | IYDASWDGSYEFSCEIDDEASRD |
| | | AGGGACCTTGCGAAAATGCCCGGGGTATTAGCTGTTAAGCCAGATATGGATAAGGTTGATATGTCAGA | LAKMPGVLAVKPDMDKVDMSEKD |
| | | GAAGGATAGTCATGGCTCAGGCCTCTCAGCAGCTAACCTAGGAAATTTCAGTGATGCTGTTTCCAATC | SHGSGLSAANLGNFSDAVSNHPS |
| | | ACCCTTCTTCTAGTGGGGAAAATGAGTTTTGGCTTGTGCGAATGGAGAAGCCTGGGGTTGAAGTTGTG | SSGENEFWLVRMEKPGVEVVTKA |
| | | ACAAAGGCACAAATGGTGGATCATTATACCCAAATCCTCATGAAAGTGTTGGGGAATGAAAAGGATGC | QMVDHYTQILMKVLGNEKDAQVS |
| | | ACAAGTCAGCATATATCACATTTCATGGGAGAGGGATTATGGCTTCTGCTGTCACATTGACGAAGAAT | IYHISWERDYGFCCHIDEECAKE |
| | | GTGCAAAGGAGCTAGCTGATGTTTCTGGAGTGTTATCTGTTCAACCGGACCCAAATTTTGGATCCGAC | LADVSGVLSVQPDPNFGSDNKNY |
| | | AACAAAAATTACAAAGGTGATGACAGCTTCAAATCGTCGGAAGCTACTCAGGCTAAAGTCAAAACTAA | KGDDSFKSSEATQAKVKTKRLFV |
| | | AAGGCTCTTTGTTACAGGTCTTTCATTTTATACATCTGAGAAAACTTTGCGGGCTGCCTTTGAGCCTT | TGLSFYTSEKTLRAAFEPFGELV |
| | | TTGGTGAACTAGTTGAAGTGAAGATAATAATGGACAAGATATCAAAAAGATCAAAAGGGTATGCTTTC | EVKIIMDKISKRSKGYAFIEYTT |
| | | ATAGAATATACCACAGAAGAAGCTGGAGGTGCTGCTCTGAAAGCAATGAACGGACAGATAATAAATGG | EEAGGAALKAMNGQIINGWMIVV |
| | | CTGGATGATAGTTGTCGATGTTGCTAAACATAGATCGAGGAACCGTCAACCCCCGTAG | DVAKHRSRNRQPP* |
| | | SEQ ID NO: 107 | SEQ ID NO: 108 |
| 55 | Xa21_Os02g0759400 | ATGCCAAGTTGCCGAGCTAGGATGCACGCGCACCAGCACGCGCTGCTCGCGGCGCTCCTCGCGTGCGC | MPSCRARMHAHQHALLAALLACA |
| | | GCTCGCGGCGTCGTCGTCGACGGCCGGAGCGCAGCCGGCGGGGCAGCAGGGGTATGTCTACGGCGACG | LAASSSTAGAQPAGQQGYVYGDV |
| | | TGTCCGGGCAGCAGGTGCACGTCAGCACGACGATGATCGTGCTGCTGGCCGCCGTCGTCGGGGTTTTC | SGQQVHVSTTMIVLLAAVVGVFL |
| | | CTGTTCATCGCGATCTCCACCATCTACCTCCGCCACTGCACCGGTTACGACCCCGCGACGGAGGGCGG | FIAISTIYLRHCTGYDPATEGGV |
| | | CGTCGGCGGGCGCCGCTCCATGATCCTACCTGCCAACAGCTTCGTCTCGAGGCGGCAGCGGCGGCCGC | GGRRSMILPANSFVSRRQRRPRG |
| | | GCGGGCTCGACTCGTCGGTGGTCCGGATGTTCCCCACCATGAAGTACGCCGAGGCGAAGGCGCTGCGG | LDSSVVRMFPTMKYAEAKALRVG |
| | | GTGGGGAAGGTCGCCGGCGCGGCGCTGGAGTGCGCGGTGTGCCTCAGTGAGTTCGAGGACGACGAGAT | KVAGAALECAVCLSEFEDDEMLR |
| | | GCTCAGGTTCTTGCCCAAGTGCAGCCACGCCTTCCACCCGGACTGCATCGGCCAGTGGCTCGCCAGCC | FLPKCSHAFHPDCIGQWLASHVT |
| | | ACGTGACATGCCCCGTCTGCCGCCGGAATCTTGACCCTAACAAGGACACCACCGAGGAGGTGATCATC | CPVCRRNLDPNKDTTEEVIIPAA |
| | | CCGGCCGCCGCCGCCGCCGCCGATCATCCGAACAGCACCTCCAGTGAAATAGTCGTGATACGGCAAGA | AAAADHPNSTSSEIVVIRQEDGA |
| | | AGACGGGGCGCACCCAGCAGCCGTGGTGATCGACGTGGTCACCGAGGAGGACGACGAGGAGCGGAGGA | HPAAVVIDVVTEEDDEERRKEEL |
| | | AGGAGGAGCTAGAGCTTCAGGCGATAGGCACCCAGCTCCGCGCGATGCGGTCACGGCCGGGGCTGCGG | ELQAIGTQLRAMRSRPGLRPKTS |
| | | CCAAAGACGTCGGCGGCGAAGCTTCCCCGGTCGCACTCCACTGGCCACTCCCTCGCCGTCCGGCTCGA | AAKLPRSHSTGHSLAVRLDGDLE |
| | | CGGCGACCTGGAGCGGTACACGCTGCGGCTGCCGGAGCACGTACACAGGGAGATGGTCTCGGCGGGGG | RYTLRLPEHVHREMVSAGEQSVR |
| | | AGCAGAGCGTGCGCCGCGGGAGGAGACTCGGGGAAGGGGTCGGCATGGGCGCTCGGTGCAGCCCCCGG | RGRRLGEGVGMGARCSPRFSRSG |
| | | TTTTCGCGGTCGGGCAGATGGTCATCTTTTCTCTCAAATTCTTTGTCAGGAAAGCTGTCTTTCCTCTC | RWSSFLSNSLSGKLSFLSPSSRR |
| | | CCCGTCGTCGAGGAGAACGCCGGATAGCACCCAGGTGGAAGTGTCATCATCCTCGTCGTCGTCGGCGA | TPDSTQVEVSSSSSSSATKVRGK |
| | | CGAAGGTGAGAGGGAAGCGCGTGGCCGCCGTCGATGTTGCCGACGACGGTTCTGCTCATGGGACTGCA | RVAAVDVADDGSAHGTAQYPGCT |
| | | CAGTACCCTGGTTGCACTGTGGCCAGCTCGGCGGCGGCGGCGGCTGTGGACGTGGAGAAGGCAGCTAC | VASSAAAAAVDVEKAATRQVRT* |
| | | CAGGCAAGTTCGAACATAG SEQ ID NO: 109 | SEQ ID NO: 110 |
| 56 | Xa21_OsJ_08589 | ATGAGGAGGATGTTGCGTTGCTTCTTCGGCGGCGGCGGCGGTGGCGACGAGACGGGAGGTGACGAGGA | MRRMLRCFFGGGGGGDETGGDEE |
| | | GAAGAAGGCGTCGGCGGCGGCGGTGGTGAAGAACAAGAAGGCGGTGAGGCGGATGCGGAGCGCGACGG | KKASAAAVVKNKKAVRRMRSATG |
| | | GGCGGCTCCGGTCGCTGTCGCTGGAGGACCTGTCGCGGACGCTGGCGCAGTCCGGGCTGCAGGCCTTC | RLRSLSLEDLSRTLAQSGLQAFT |
| | | ACGCTGGCGGAGCTCAAGGCCGCCACGCGCAGCTTCTCCGGCAGCAACTTCATCGGCGAGGGCGGATT | LAELKAATRSFSGSNFIGEGGFG |
| | | CGGCCCCGTCTACAAGGGCTTCATCGACGCCAAGCTCCGCCCCGGCATCCTCCAGCCCCAGCACGTCG | PVYKGFIDAKLRPGILQPQHVAV |
| | | CCGTCAAGTACCTCGACGGCGAAGGCGACCAGGGCCACCGCGAATGGCTGGCGGAGGTGGTGTACCTG | KYLDGEGDQGHREWLAEVVYLGM |
| | | GGGATGTTGAGCCATCCGCATCTGGTGAAGCTGATCGGCTACTGCTGCCAAGACGACCACCGGATGCT | LSHPHLVKLIGYCCQDDHRMLVY |
| | | CGTCTACGAGTACATGGCCAGGGGCAGCCTCGAGCACCACCTCTTCAAGAATTTGCTGTCGAGCTTGC | EYMARGSLEHHLFKNLLSSLPWA |
| | | CATGGGCGACGCGGCTGAAGATCGCGGTGGGCGCGGCCAAGGGGCTCGCGTTCCTGCACGACGCCGAC | TRLKIAVGAAKGLAFLHDADTPV |
| | | ACTCCGGTGATCTACCGAGACTTCAAGGCATCCAACATCCTGCTCGACTCGGATTACACGGCGAAGCT | IYRDFKASNILLDSDYTAKLSDF |
| | | CTCGGACTTCGGGCTGGCCAAGGAGGGCCCGCAGGGGGACGCGACCCACGTGACGACGCGCGTGATGG | GLAKEGPQGDATHVTTRVMGTHG |
| | | GGACCCACGGGTACGCGGCGCCGGAGTACATCCTGACGGGGCACCTGACGGCGAAGAGCGACGTGTAC | YAAPEYILTGHLTAKSDVYSFGV |
| | | AGCTTCGGGGTGGTGCTGCTGGAGCTGCTGACGGGGCGGCGGAGCGTGGACAAGCGGCGGCGCGGGCG | VLLELLTGRRSVDKRRRGREQNL |
| | | GGAGCAGAACCTCGTGGACTGGGCGCGGCCGTACCTCCGGCGGCCGGAGCGGCTGCACCGGGTGATGG | VDWARPYLRRPERLHRVMDPSLE |
| | | ACCCCAGCCTGGAGGGCGGCTACTCCGACAGGGCGGCGGCCAAGGCCGCCATGGTGGCGTACCACTGC | GGYSDRAAAKAAMVAYHCLHSVP |
| | | CTCCACAGCGTGCCCAAGTCCCGCCCCCACATGCGCGACGTCGTCGCCGCGCTCGAGCCGCTGCTGCA | KSRPHMRDVVAALEPLLQTSCGD |
| | | GACGTCGTGCGGCGACGTGCTCGCCGGGCCCTTCGTCTACACCGTCCCGTCCGCGCCGGCGCCCGCCG | VLAGPFVYTVPSAPAPAAVVVAK |
| | | CTGTTGTTGTCGCCAAGGACGACGAGAAGAAGGCGGCCGCGGCCGCGGGTGAGGACGGCGAGGAGGAG | DDEKKAAAAAGEDGEEEVAAVAK |
| | | GTGGCGGCGGTGGCCAAGGCGAAGAGGAGGTACGTGGCGTCGGCGGTGCACGCGGAGGGCGCGATGCG | AKRRYVASAVHAEGAMRKGEHRY |
| | | GAAGGGGGAGCACCGGTACGCGAGCTCCGTGTCCGGCTCGCCGAGGCAGAGCAGGGACAGGGGCGCGT | ASSVSGSPRQSRDRGA* |
| | | AG SEQ ID NO: 111 | SEQ ID NO: 112 |
| 57 | Xa21_Os02g0787800 | ATGGAGCGAGCGGAGGAGACGCCGAGGGCGCCGTCGACGGCGCCGTCGGCGAGGGTGTCGATCTGGGA | MERAEETPRAPSTAPSARVSIWE |
| | | GTCGGTGCGCGCGTGCGGGGTGTGGGGGAAGGAGGTGGACAAGGCCGAGCTGCGGAGGCAGGTCGTCA | SVRACGVWGKEVDKAELRRQVVM |
| | | TGCCGCTGTACGCGCGGCGTGCGGTCGCGGCCGCCGTGAAGGCCAAGGACGAGGCCGTCGGCGTGGCG | PLYARRAVAAAVKAKDEAVGVAA |
| | | GCGGCGGCGGAGAGGGGCGAGGAGGTGGAGGGGGAGGTGGAGGTGGAGGCGGCCGTGACGCCGGTGGT | AAERGEEVEGEVEVEAAVTPVVV |
| | | GGTGTTCGTCAACTCGCGGAGCGGTGGTAGGCACGGGCCCGAGCTCAAGGTGCGGCTCCACGAGCTCA | FVNSRSGGRHGPELKVRLHELIS |
| | | TCAGCGAGGAGCAGGTCTTTGATCTCTCTGTCGTGAAGCCTTCTGATTTCATTAACTACGGGTTGGGT | EEQVFDLSVVKPSDFINYGLGCL |
| | | TGTTTGGAGAAATTGGCCGAACAAGGTGACAATTGTGCGGAGACCATTCGAAAAAAATTGAGGATTAT | EKLAEQGDNCAETIRKKLRIMVA |
| | | GGTTGCTGGTGGTGATGGCACAGTTGGTTGGGTACTTGGCTGTCTCACAGATCTTTATAGGTTGAAAA | GGDGTVGWVLGCLTDLYRLKREP |
| | | GAGAACCAGTTCCACCCACAGGTATCATCCCACTTGGTACAGGAAATGATCTTGCCAGATCATTTGGA | VPPTGIIPLGTGNDLARSFGWGG |
| | | TGGGGTGGCTCTTTTCCCTTCGGTTGGCGTTCAGCTGTGAAGCGTTATCTCAGCAAGGCAGCTACAGC | SFPFGWRSAVKRYLSKAATAPTC |
| | | TCCCACATGCCGTCTTGATAGTTGGCAAGCTGTAGTTATGATGCCAGATGGAGAGATAAAAGAGTTGC | RLDSWQAVVMMPDGEIKELPYAL |
| | | CATATGCACTTAAGAAAACGGAACCTGCAGACTGCTTGGAACTTTGCCAGGAGAATGGCACTGAGTTA | KKTEPADCLELCQENGTELPEKA |
| | | CCTGAGAAAGCTTCTTGCTATAAAGGAGTATTCTACAACTACCTTAGCATTGGGATGGATGCCCAAGT | SCYKGVFYNYLSIGMDAQVAYGF |
| | | TGCTTATGGCTTCCACCATCTTCGTGATGAAAAGCCATATCTTGCTCAAGGGCCAGTTGCAAATAAGT | HHLRDEKPYLAQGPVANKLIYAG |
| | | TGATATATGCTGGTTATAGCTGCACACAGGGGTGGTTCTGCACACCTTGTACAGCAAGCCCTCAGTTA | YSCTQGWFCTPCTASPQLRGLKN |
| | | AGGGGGCTTAAGAACATTTTGCGACTTTACATTAAAAAAGTCAATTGTTCTGAATGGGAGCAAGTTAC | ILRLYIKKVNCSEWEQVTMPSSV |
| | | AATGCCTTCAAGTGTTAGATCCCTGGTGGTCTTAAATTTATACAACTACGGCAGTGGAAGGCATCCAT | RSLVVLNLYNYGSGRHPWGDLKP |
| | | GGGGTGATCTTAAACCTGATTACCTTGAAAAGAAAGGTTTTGTTGAAGCTCATTCCGATGATGGATTG | DYLEKKGFVEAHSDDGLLEIFGL |
| | | CTTGAAATATTCGGTCTGAAAGAAGGTTGGCATGCTTCATTCGTTATGGCTGAGCTAATTAAAGCAAA | KEGWHASFVMAELIKAKHIAQAA |
| | | GCACATTGCTCAGGCTGCAGCCATCAAGTTTGAAATGAGGGGTGGCCAATGGAATCGTGCGTATGTTC | AIKFEMRGGQWNRAYVQMDGEPW |
| | | AGATGGATGGAGAGCCATGGAAACAACCACTCCTACAGGAGCAGTCAACCATTATCGAGATTAACAAA | KQPLLQEQSTIIEINKVPYPSLM |
| | | GTTCCTTACCCTTCTCTGATGATAAATGGGGAGCAATGA | INGEQ* |
| | | SEQ ID NO: 113 | SEQ ID NO: 114 |
| 58 | Xa21_OsJ_09250 | ATGGCGGAGGCGGCGGGGGTGGGGGCGGGGGCCGGGCCGGCGAGGAGGACGACGAGGGTGGGGCGCTA | MAEAAGVGAGAGPARRTTRVGRY |
| | (former:Os03g0126800) | CGAGCTCGGCAAGACGATCGGGGAGGGGAGCTTCGCCAAGGTCAAGGTCGCCCGCGACACGCGCACCG | ELGKTIGEGSFAKVKVARDTRTG |
| | | GCGACACCCTCGCCATCAAGGTGCTCGACCGCAACCATGTGCTTCGCCACAAGATGGTCGAGCAGATC | DTLAIKVLDRNHVLRHKMVEQIK |
| | | AAACGGGAGATTTCCACAATGAAGCTAATAAAACATCCAAATGTGGTCCAGTTGCATGAGGTCATGGC | REISTMKLIKHPNVVQLHEVMAS |
| | | TAGCAAATCAAAGATATACATGGTTCTTGAATATGTTGATGGAGGCGAGCTTTTTGATAAGATTGTCA | KSKIYMVLEYVDGGELFDKIVNS |
| | | ATTCTGGGAGGCTAGGAGAAGATGAAGCAAGAAGATACTTCCATCAACTTATAAATGCAGTAGATTAT | GRLGEDEARRYFHQLINAVDYCH |
| | | TGCCACAGCAGAGGAGTGTACCATAGAGATCTGAAGCCAGAGAATCTGCTTCTTGATTCACATGGAGC | SRGVYHRDLKPENLLLDSHGALK |
| | | TCTTAAAGTTTCAGATTTCGGCCTTAGTGCGTTTGCTCCACAAACAAAAGAGGATGGACTTCTGCATA | VSDFGLSAFAPQTKEDGLLHTAC |
| | | CTGCTTGCGGAACACCAAATTATGTTGCACCTGAGGTGCTTGCTGATAAAGGTTATGATGGTATGGCT | GTPNYVAPEVLADKGYDGMAADV |
| | | GCTGATGTATGGTCCTGCGGCATAATCTTATTTGTCCTCATGGCTGGATATTTACCTTTCGATGACCC | WSCGIILFVLMAGYLPFDDPNLM |
| | | CAACCTAATGACCCTTTACAAACTGATCTGCAAGGCAAAAGTTTCTTGTCCACACTGGTTTTCTTCAG | TLYKLICKAKVSCPHWFSSGAKK |
| | | GTGCGAAGAAATTCATTAAGCGCATACTTGATCCTAATCCCTGCACAAGAATAACAATTGCACAAATT | FIKRILDPNPCTRITIAQILEDD |
| | | TTGGAAGATGATTGGTTCAAAAAGGATTACAAACCACCACTTTTTGAGCAAGGTGAAGATGTGAGCCT | WFKKDYKPPLFEQGEDVSLDDVD |
| | | TGATGATGTTGATGCTGCATTCGATTGTTCAGAGGAGAATCTCGTGGCAGAGAAGAGAGAAAAGCCTG | AAFDCSEENLVAEKREKPESMNA |
| | | AATCCATGAATGCATTTGCTCTAATTTCAAGGTCACAGGGATTCAACCTTGGAAATTTATTTGAGAAG | FALISRSQGFNLGNLFEKEMMGM |
| | | GAAATGATGGGAATGGTGAAGCGGGAAACTTCCTTCACATCTCAATGTACACCACAGGAGATCATGTC | VKRETSFTSQCTPQEIMSKIEEA |
| | | TAAAATAGAGGAAGCTTGTGGACCTCTTGGTTTCAATGTGCGGAAACAAAATTATAAGATGAAGTTAA | CGPLGFNVRKQNYKMKLKGDKTG |
| | | AAGGTGATAAGACTGGAAGAAAAGGCCATTTATCTGTAGCAACGGAGGTTTTCGAGGTTGCTCCATCA | RKGHLSVATEVFEVAPSLHMVEL |
| | | CTCCACATGGTTGAGCTTCGTAAAACTGGAGGGGACACGCTGGAGTTTCACAATTTCTACAACAATTT | RKTGGDTLEFHNFYNNFSSELKD |
| | | CTCGTCAGAGTTAAAAGACATAGTGTGGAAATCTGAATCTGACGCAAAAGCAGCAAAGAAGAGGTGA | IVWKSESDAKAAKKR* |
| | | SEQ ID NO: 115 | SEQ ID NO: 116 |
| 59 | Xa21_Os03g0180900 | ATGGCCGGTAGTAGTAGCGAGCAGCAGCTGGTCGCCAACGCGGCGGCTACGACGGTGGCCGGGAACGG | MAGSSSEQQLVANAAATTVAGNG |
| | | GAGCAGGTTCGCGGTGACGTGTGGCTTGCTCAGGCAGTACATGAAGGAGCACAGTGGAAGCAACGGCG | SRFAVTCGLLRQYMKEHSGSNGG |
| | | GCGGTGGCTTCTTGCCGGCGGTGACGGCCATGAGCCTCATGACCGGCGGCGCTGATGCGGAGGAGGCG | GGFLPAVTAMSLMTGGADAEEAA |
| | | GCGCCGGAGGTGAGGAAGACCATGGAGCTCTTCCCTCAGCAGGCTGGGACGCTGAAAGACTCGCAAGA | PEVRKTMELFPQQAGTLKDSQER |
| | | AAGGAAGGAGATCACTGAGAAGGCGGCGCAGCTGACCATCTTCTACGGCGGGAGCGTGGTGGTGTTCG | KEITEKAAQLTIFYGGSVVVFDD |
| | | ACGACTTCCCCGCCGAGATGGCCGGCGAGCTGATGAAGCTCGCCGGCTCCCGCGACAGCACGGCGGCG | FPAEMAGELMKLAGSRDSTAAAA |
| | | GCGGCCGTCTCCGACGCCGGCGCCGCAGCGGGGCAGCCTTGCCTACCAGACATGCCCATCGCGAGGAA | VSDAGAAAGQPCLPDMPIARKVS |
| | | GGTGTCGCTGCAGAGGTTCCTGGAGAAGAGGAAGAACAGGATCGTCGCGGCGGAGCCACTGCCGGAGT | LQRFLEKRKNRIVAAEPLPESEK |
| | | CGGAGAAGAAGGAGGCGGAGCCGAGCAAGCGTGCCAAGAAAGACGACGGCGGCGCGTCGTGGCTCCAG | KEAEPSKRAKKDDGGASWLQVNP |
| | | GTGAACCCCACTCTCAGCCTGTGA | TLSL* |
| | | SEQ ID NO: 117 | SEQ ID NO: 118 |
| 60 | Xa21_OsJ_09990 | ATGGAGCTAGGCGTGCCACTGCCACGACGGCCCGTGCCCGGTAGCTACGGCGTGCCGTTCGTCTCGGC | MELGVPLPRRPVPGSYGVPFVSA |
| | (former:Os03g0225900) | GGTGCGCGACCGCCTCGACTTCTACTACTTGCAGGGGCAGGACAAGTACTTCGAGTCGCGCGCCGAGA | VRDRLDFYYLQGQDKYFESRAER |
| | | GGTACGGCTCCACCGTCGTCCGCATCAACGTCCCGCCTGGCCCCTTCATGGCGCGCGACCCCCGCGTG | YGSTVVRINVPPGPFMARDPRVV |
| | | GTGGCGCTCCTCGACGCCAAGAGCTTCCCCGTCCTCTTCGACGTCGCCAAGGTCGAGAAGCGGGACGT | ALLDAKSFPVLFDVAKVEKRDVF |
| | | GTTCACCGGCACGTTCATGCCGTCCACCTCCCTCACAGGCGGCTACCGCGTCTGCGCCTACCTCGACC | TGTFMPSTSLTGGYRVCAYLDPS |
| | | CGTCCGAGCCCAACCACGCCAAGATCAAGCAGCTGCTCCTCTCCCTCCTGGTCTCTCGCAAGGACGCC | EPNHAKIKQLLLSLLVSRKDAFV |
| | | TTCGTCCCGGTCTTCCGCTCCAACTTCGGCGCGCTCCTCGACACCGTCGAGTTGCAGCTCGCCAGCGG | PVFRSNFGALLDTVELQLASGGG |
| | | CGGCGGCAAGTCGGACTTCACCGCCCTCAACGATGCCACCTCCTTCGAGTTCATCGGCGAGGCGTACT | KSDFTALNDATSFEFIGEAYFGV |
| | | TCGGCGTGCGTCCCTCCGCGTCGAGCTCCCTCGGCACCGGCGGGCCGACCAAGGCCGCCCTGTGGCTC | RPSASSSLGTGGPTKAALWLLWQ |
| | | CTATGGCAGCTCGCCCCGCTCACCACGCTCGGCCTGCCCATGATCATCGAGGATCCGCTCCTCCACAC | LAPLTTLGLPMIIEDPLLHTLPL |
| | | GCTGCCGCTGCCACCCTTCCTCATCAGCTCCGACTACAAGGCGCTGTACGCGTACTTCGCCGCCGCGG | PPFLISSDYKALYAYFAAAASQA |
| | | CGTCGCAGGCGCTCGACGCCGCCGAGGGCCTTGGCCTGTCGCGGGAGGAGGCCTGCCACAACCTGCTG | LDAAEGLGLSREEACHNLLFATA |
| | | TTCGCGACGGCCGGCGAGAAGCTCCACGAGAGGCTCGCCGCGGAGATACGAAGCGCGGTGGCCGACGC | GEKLHERLAAEIRSAVADAGGNV |
| | | CGGCGGCAACGTGACGCTGGCCGCTCTGGAGAAGATGGAGCTGACCAGGTCGGTGGTGTGGGAGGCGC | TLAALEKMELTRSVVWEALRLDP |
| | | TGCGGCTGGACCCGCCGGTCAGGTTCCAGTACGGGCGCGCCAAGGCCGACCTGGAGATCGAGAGCCAC | PVRFQYGRAKADLEIESHDASFA |
| | | GACGCGTCGTTCGCGATCAAGAAGGGGGAGATGCTGTTCGGCTACCAGCCGTGCGCCACCAGGGACCC | IKKGEMLFGYQPCATRDPRVFGA |
| | | GCGGGTGTTCGGCGCCACGGCGAGGGAGTTCGTTGGCGACCGGTTCGTCGGCGAGGAGGGGAGGAAGC | TAREFVGDRFVGEEGRKLLQYVY |
| | | TGCTGCAGTACGTGTACTGGTCGAATGGGCGAGAGACGGAGAACCCTAGCGTTGACAACAAGCAGTGC | WSNGRETENPSVDNKQCPGKNLV |
| | | CCCGGCAAGAATCTTGTGGTGCTCGTCGGTAGGCTGCTGCTCGTCGAGCTCTTCCTCCGGTACGACAC | VLVGRLLLVELFLRYDTFTAEAG |
| | | CTTCACCGCCGAGGCCGGCAAAAAGGTGGTCATCACCGGGGTCACCAAAGCTTCAACCTCCGTCGTCA | KKVVITGVTKASTSVVNRTA* |
| | | ATCGTACTGCTTAA SEQ ID NO: 119 | SEQ ID NO: 120 |
| 61* | Xa21_Os03g0241400 | ATGTCGAGGTGCTTCCCCTACCCGCCGCCGGGGTACGTGCGAAACCCAGTGGTGGCCGTGGCCGCGGC | MSRCFPYPPPGYVRNPVVAVAAA |
| | | CGAAGCGCAGGCGACCACTAAGCTCCAGAAAGAAAGGGAAAAGGCCGAAAAGAAGAAAGAGAAAAAGA | EAQATTKLQKEREKAEKKKEKKS |
| | | GTGACAGGAAAGCTCTTCCACATGGTGAGATATCCAAACATTCAAAGCGAACCCACAAGAAGAGAAAA | DRKALPHGEISKHSKRTHKKRKH |
| | | CATGAAGACATCAATAATGCTGATCAGAAGTCCCGGAAGGTTTCCTCCATGGAACCTGGTGAGCAATT | EDINNADQKSRKVSSMEPGEQLE |
| | | GGAGAAGAGTGGACTCTCAGAAGAGCATGGAGCTCCTTGCTTTACTCAGACAGTGCATGGCTCTCCAG | KSGLSEEHGAPCFTQTVHGSPES |
| | | AGAGTTCACAGGACAGCAGCAAGAGAAGAAAGGTTGTGGTACCCAGTCCTAGCCAAGCTAAGAATGGT | SQDSSKRRKVVVPSPSQAKNGNI |
| | | AACATCCTTCGAATAAAGATAAGAAGAGATCAAGATTCTTCAGCTTCCATTTCTGAGAAATCTAATGT | LRIKIRRDQDSSASISEKSNVVQ |
| | | TGTACAAACACCAGTTCATCAAATGGGTTCAGTTTCATCTCTGCCCAGTAAGAAAAACTCAATGCAAC | TPVHQMGSVSSLPSKKNSMQPHN |
| | | CACACAACACTGAAATGATGGTGAGGACAGCATCAACCCAGCAGCAAAGCATCAAAGGTGATTTTCAA | TEMMVRTASTQQQSIKGDFQAVP |
| | | GCAGTACCGAAACAAGGTATGCCAACCCCAGCAAAAGTCATGCCAAGAGTCGATGTTCCTCCTCCATC | KQGMPTPAKVMPRVDVPPPSMRA |
| | | TATGAGGGCATCAAAGGAAAGGGTTGGCCTTCGTCCTGCAGAGATGTTGGCCAATGTTGGTCCTTCAC | SKERVGLRPAEMLANVGPSPSKA |
| | | CCTCCAAGGCAAAACAAATTGTCCATCCCGCACCTGCTAAGGTTACACAAAGGGTTGATCCTCCACCT | KQIVHPAPAKVTQRVDPPPAKAS |
| | | GCTAAGGCATCTCAGAGAATTGATCCTCAGTTGCCATCCAAGGTTCATATAGATGCTACTCGATCTTT | QRIDPQLPSKVHIDATRSFTKVS |
| | | TACGAAGGTCTCCCAGACAGAGATCAAGCCGGAAGTACAGCCCCCAATTCCGAAGGTGCCTGTGGCTA | QTEIKPEVQPPIPKVPVAMPTIN |
| | | TGCCTACCATCAATCGTCAGCAGATTGACACCTTGCAGCCCAAAGAAGAGCCTTGCTCCTCTGGCAGG | RQQIDTLQPKEEPCSSGRNAEAA |
| | | AATGCTGAAGCTGCTTCAGTATCAGTAGAGAAGCAGTCCAAGTCAGATCGCAAAAAGAGTCGCAAAGC | SVSVEKQSKSDRKKSRKAEKKEK |
| | | TGAGAAGAAAGAGAAGAAGTTCAAAGATTTATTTGTTACCTGGGATCCTCCGTCTATGGAAATGGATG | KFKDLFVTWDPPSMEMDDMDLGN |
| | | ATATGGATCTTGGCAACCAGGATTGGCTGCTTGGTAGTACGAGGAAACCTGATGCTGGCATTGGCAAC | QDWLLGSTRKPDAGIGNCREIVD |
| | | TGCAGAGAAATTGTTGATCCACTTACTTCTCAATCAGCAGAGCAGTTCTCATTGCAGCCCAGGGCGAT | PLTSQSAEQFSLQPRAIHLPDLH |
| | | TCATTTACCAGACCTTCATGTCTATCAGTTGCCATATGTGGTTCCATTCTAG | VYQLPYVVPF* |
| | | SEQ ID NO: 121 | SEQ ID NO: 122 |
| 62 | Xa21_Os03g0265600 | ATGTCGTACTCCAGAGGATCAAGATATGAGTCCCACTCATATTCTACATCGCCCAGACGGAGCAGCCG | MSYSRGSRYESHSYSTSPRRSSR |
| | | TTCAAGGTATAGGAGTCGTTCTAGGAGTGTGGACTCAAGTGATGTTGAAAACCCTGGGAACAACCTGT | SRYRSRSRSVDSSDVENPGNNLY |
| | | ATGTTACTGGCTTATCTGCTCGTGTGACGGATCGAGATCTGGAGAAACACTTTTCTGCTGAGGGAGAG | VTGLSARVTDRDLEKHFSAEGEV |
| | | GTTATTGATGCTAGCATAGTACTTGATCCATGGACAAGGGAATCCCGGGGATTTGGATTTGTTACCAT | IDASIVLDPWTRESRGFGFVTMA |
| | | GGCTACTGTTAAGGAGGCTGATCTTTGCATCAAATATCTAGACCGCTCAGTGTTGGAAGGTCGTGTGA | TVKEADLCIKYLDRSVLEGRVIT |
| | | TAACTGTAGAGAAGCTTTTGTTGACAGCAGCAGGGTAG | VEKLLLTAAG* |
| | | SEQ ID NO: 123 | SEQ ID NO: 124 |
| 63 | Xa21_OsJ_10337 | ATGGCCGGCAAGGGAGACGGGCCGGCGATCGGCATCGACCTCGGGACGACCTACTCGTGCGTCGGCGT | MAGKGDGPAIGIDLGTTYSCVGV |
| | (Os03g0277300) | GTGGCAGCACGACCGCGTCGAGATCATCGCCAACGACCAGGGGAACCGCACCACGCCGTCGTATGTCG | WQHDRVEIIANDQGNRTTPSYVA |
| | | CGTTCACGGACTCGGAGAGGCTCATCGGCGACGCCGCCAAGAACCAGGTGGCCATGAACCCCATCAAC | FTDSERLIGDAAKNQVAMNPINT |
| | | ACCGTCTTCGATGCGAAGCGTCTCATCGGCCGGCGTTTCTCTGACACGTCGGTGCAGAGCGACGCGAA | VFDAKRLIGRRFSDTSVQSDAKL |
| | | GCTGTGGCCGTTCAAGGTGCTCCCCGGCCCCGGCGACAAGCCGATGATCGGCGTGCAGTACAAGGGCG | WPFKVLPGPGDKPMIGVQYKGEE |
| | | AGGAGAAGCAGTTCTCCGCCGAGGAGATCTCGTCCATGGTGCTCAACAAGATGAAGGAGACGGCCGAG | KQFSAEEISSMVLNKMKETAEAY |
| | | GCCTACCTCGGCAGCACCGTCAAGAACGCCGTCGTCACCGTCCCCGCCTACTTCAACGACTCCCAGCG | LGSTVKNAVVTVPAYFNDSQRQA |
| | | CCAGGCCACCAAGGACGCCGGCGTCATCTCCGGCCTCAACGTCATGCGCATCATCAACGAGCCCACCG | TKDAGVISGLNVMRIINEPTAAA |
| | | CCGCCGCCATCGCCTACGGCCTCGACAAGAAGGCCGCCAGCACCGGCGAGAAGAACGTGCTCATCTTC | IAYGLDKKAASTGEKNVLIFDLG |
| | | GACCTCGGCGGCGGCACCTTCGACGTCTCCATCCTCACCATCGAGGAGGGCATCTTCGAGGTCAAGGC | GGTFDVSILTIEEGIFEVKATAG |
| | | CACCGCCGGCGACACCCACCTGGGAGGCGAGGACTTCGACAACCGGATGGTGAACCACTTCGTGCAGG | DTHLGGEDFDNRMVNHFVQEFKR |
| | | AGTTCAAGAGGAAGCACAAGAAGGACATCACCGGCAACCCGAGGGCGCTCCGGCGGCTGAGGACGGCG | KHKKDITGNPRALRRLRTACERA |
| | | TGCGAGAGGGCGAAGAGGACGCTGTCCTCCACCGCACAGACCACCATCGAGATCGACTCGCTCTACGA | KRTLSSTAQTTIEIDSLYEGIDF |
| | | GGGCATCGACTTCTACGCCACCATCACCCGCGCCCGGTTCGAGGAGCTCAACATGGACCTCTTCCGCC | YATITRARFEELNMDLFRRCMEP |
| | | GGTGCATGGAGCCCGTGGAGAAGTGCCTCCGCGACGCCAAGATGGACAAGGCCCAGATCCACGACGTC | VEKCLRDAKMDKAQIHDVVLVGG |
| | | GTCCTCGTCGGAGGCTCCACCCGTATCCCCAAGGTGCAGCAGCTCCTGCAGGACTTCTTCAACGGGAA | STRIPKVQQLLQDFFNGKELCKS |
| | | GGAGCTCTGCAAGAGCATCAACCCCGACGAGGCCGTGGCGTACGGCGCCGCCGTCCAGGCCGCCATCC | INPDEAVAYGAAVQAAILSGEGN |
| | | TCAGCGGCGAGGGCAACCAGAGGGTGCAGGACCTGCTCCTCCTCGACGTCACGCCGCTCTCGCTCGGG | QRVQDLLLLDVTPLSLGLETAGG |
| | | TTGGAGACGGCCGGAGGCGTGATGACCGTGCTGATCCCGAGGAACACCACCATCCCCACCAAGAAGGA | VMTVLIPRNTTIPTKKEQVFSTY |
| | | GCAGGTCTTCTCCACCTACTCCGACAATCAGCCCGGCGTGCTCATCCAGGTGTACGAGGGCGAGAGGA | SDNQPGVLIQVYEGERTRTKDNN |
| | | CGAGGACCAAGGACAACAACCTGCTCGGCAAGTTCGAGCTCACCGGCATCCCTCCGGCGCCGAGGGGC | LLGKFELTGIPPAPRGVPQINVT |
| | | GTGCCCCAGATCAACGTGACGTTCGACATCGACGCGAACGGCATCCTGAACGTGTCGGCGGAGGACAA | FDIDANGILNVSAEDKTTGKKNK |
| | | GACGACGGGGAAGAAGAACAAGATCACCATCACCAACGACAAGGGGCGGCTGAGCAAGGAGGAGATCG | ITITNDKGRLSKEEIERMVQEAE |
| | | AGCGGATGGTGCAGGAGGCCGAGAAGTACAAGGCCGAGGACGAGCAGGTGCGGCACAAGGTGGAGGCC | KYKAEDEQVRHKVEARNALENYA |
| | | CGCAACGCGCTGGAGAACTACGCGTACAACATGCGCAACACGGTGCGCGACGACAAGATCGCCTCCAA | YNMRNTVRDDKIASKLPADDKKK |
| | | GCTCCCCGCCGACGACAAGAAGAAGATCGAGGACGCCATCGAGGATGCCATCAAGTGGCTCGACGGCA | IEDAIEDAIKWLDGNQLAEADEF |
| | | ACCAGCTCGCCGAGGCCGACGAGTTCGAGGACAAGATGAAGGAGCTCGAGAGCCTCTGCAACCCGATC | EDKMKELESLCNPIISKMYQGGA |
| | | ATCTCAAAGATGTACCAGGGCGGCGCCGGTGGTCCGGCGGGCATGGACGAAGACGCCCCCAACGGCGG | GGPAGMDEDAPNGGAGTGGGSGA |
| | | CGCCGGCACCGGCGGTGGCAGCGGCGCTGGCCCCAAGATCGAGGAAGTGGACTAA | GPKIEEVD* |
| | | SEQ ID NO: 125 | SEQ ID NO: 126 |
| 64 | Xa21_OsJ_10412 | ATGGACGGGGCGCCGGTGGCGGAGTTCAGGCCGACGATGACGCACGGCGGCCGGTACCTGCTCTACGA | MDGAPVAEFRPTMTHGGRYLLYD |
| | (Os03g0285800) | CATCTTCGGGAACAAGTTCGAGGTGACGAACAAGTACCAGCCGCCCATCATGCCCATCGGCCGCGGCG | IFGNKFEVTNKYQPPIMPIGRGA |
| | | CCTACGGGATCGTCTGCTCGGTGATGAACTTTGAGACGAGGGAGATGGTGGCGATAAAGAAGATCGCC | YGIVCSVMNFETREMVAIKKIAN |
| | | AACGCGTTCAACAACGACATGGACGCCAAGCGGACGCTCCGGGAGATCAAGCTCCTCAGGCACCTCGA | AFNNDMDAKRTLREIKLLRHLDH |
| | | CCACGAGAACATCATAGGCATCAGGGACGTGATCCCGCCGCCGATCCCTCAGGCGTTCAACGACGTCT | ENIIGIRDVIPPPIPQAFNDVYI |
| | | ACATCGCCACGGAGCTCATGGACACCGACCTCCATCACATCATCCGCTCCAACCAAGAACTGTCAGAA | ATELMDTDLHHIIRSNQELSEEH |
| | | GAGCACTGCCAGTATTTCCTGTATCAGATCCTGCGGGGGCTCAAGTACATCCACTCGGCGAACGTGAT | CQYFLYQILRGLKYIHSANVIHR |
| | | CCACCGCGACCTGAAGCCGAGCAACCTGCTGCTGAACGCCAACTGCGACCTCAAGATCTGCGACTTCG | DLKPSNLLLNANCDLKICDFGLA |
| | | GGCTGGCGCGGCCGTCGTCGGAGAGCGACATGATGACGGAGTACGTGGTCACCCGGTGGTACCGCGCG | RPSSESDMMTEYVVTRWYRAPEL |
| | | CCGGAGCTGCTGCTCAACTCCACCGACTACTCCGCCGCCATCGACGTCTGGTCCGTCGGCTGCATCTT | LLNSTDYSAAIDVWSVGCIFMEL |
| | | CATGGAGCTCATCAACCGCCAGCCGCTCTTCCCCGGCCGGGACCACATGCACCAGATGCGCCTCATCA | INRQPLFPGRDHMHQMRLITEVI |
| | | CCGAGGTGATCGGGACGCCGACGGACGACGAGCTGGGGTTCATACGGAACGAGGACGCGAGGAAGTAC | GTPTDDELGFIRNEDARKYMRHL |
| | | ATGAGGCACCTGCCGCAGTACCCGCGCCGGACGTTCGCGAGCATGTTCCCGCGGGTGCAGCCCGCCGC | PQYPRRTFASMFPRVQPAALDLI |
| | | GCTCGACCTCATCGAGAGGATGCTCACCTTCAACCCGCTGCAGAGGATCACAGTTGAGGAGGCGCTCG | ERMLTFNPLQRITVEEALDHPYL |
| | | ATCATCCTTACCTAGAGAGATTGCACGACATCGCCGATGAGCCCATCTGCCTGGAGCCCTTCTCCTTC | ERLHDIADEPICLEPFSFDFEQK |
| | | GACTTCGAGCAGAAGGCTCTAAACGAGGACCAGATGAAGCAGCTGATCTTCAACGAAGCGATCGAGAT | ALNEDQMKQLIFNEAIEMNPNFR |
| | | GAACCCAAACTTCCGGTACTAG | Y* |
| | | SEQ ID NO: 127 | SEQ ID NO: 128 |
| 65 | Xa21_OsJ_10445 | ATGGCACGGCTCGTGCTCTCCGAGTGCTGCGGCCTCACGCCGCTCCGCCTGCGCGGGCGCGGCGCCAT | MARLVLSECCGLTPLRLRGRGAI |
| | (Os03g0290300) | TGCGCTGCCGGCGCCTCCCAGCCTCACGGCGGGGCCGCGCCGCCCCGTGCCCGCCGCCGCCGCGGGGG | ALPAPPSLTAGPRRPVPAAAAGG |
| | | GAGCCATCCACCGCGAGTGGGCGCTCCGCGTCTCCGCCCCGACCCGCCTCACCTCCGTCGTCGAGGAG | AIHREWALRVSAPTRLTSVVEED |
| | | GATAATAGAGGGGAGGAGGTGGTGGAGGAGGAGGCCAGGGGTTCGTTGGCGGCCGCCGCCGTAGGAGG | NRGEEVVEEEARGSLAAAAVGGD |
| | | GGACGGAGACGGGTTCGACCCCGGGGCGCCGCCGCCGTTCGGGCTCGCGGAGATCCGCGCGGCCATCC | GDGFDPGAPPPFGLAEIRAAIPK |
| | | CCAAGCACTGCTGGGTGAAGGACCCCTGGAGGTCCATGAGCTACGTGCTGCGCGACGTCGTCGTCGTG | HCWVKDPWRSMSYVLRDVVVVLG |
| | | CTCGGCCTCGCCGCCGCCGCTGCGCGCGTCGACAGCTGGCTCGTCTGGCCGCTCTACTGGGCCGCGCA | LAAAAARVDSWLVWPLYWAAQGT |
| | | GGGCACCATGTTCTGGGCGCTCTTCGTGCTGGGTCACGACTGTGGCCATGGGAGCTTCTCAAGCAACG | MFWALFVLGHDCGHGSFSSNAKL |
| | | CCAAGTTGAACAGCGTGGTTGGACACATACTCCACTCCTCCATCCTTGTCCCATACCACGGCTGGAGG | NSVVGHILHSSILVPYHGWRISH |
| | | ATTAGCCACAGGACGCACCACCAGAACCACGGTCATGTCGAGAAAGACGAGTCCTGGCAACCGCTGTC | RTHHQNHGHVEKDESWQPLSERL |
| | | TGAGAGGCTGTACAATAGCCTGGACTATATGACGAAGAAATTGAGGTTCACCATGCCGTTTCCCATGC | YNSLDYMTKKLRFTMPFPMLAFP |
| | | TGGCATTCCCATTATACTTGTTTGCAAGGAGTCCAGGGAAAAAAGGTTCACACTTCAACCCAAGCAGT | LYLFARSPGKKGSHFNPSSDLFQ |
| | | GATCTGTTCCAACCAAATGAGAAGAAGGATGTGATAACATCAACTGCATCCTGGCTGGCAATGGTTGG | PNEKKDVITSTASWLAMVGILAG |
| | | GATTCTTGCTGGTCTGACCTTTGTGATGGGCCCCCTCAAAATGTTAAAGCTCTATGCTGTTCCATACG | LTFVMGPLKMLKLYAVPYVIFVM |
| | | TGATATTTGTTATGTGGCTTGATTTTGTCACATACTTGCACCATCATGGCCATGAGGACAAGCTTCCT | WLDFVTYLHHHGHEDKLPWYRGK |
| | | TGGTACCGTGGAAAGGAATGGAGCTATCTGCGCGGAGGATTGACAACACTTGATCGGGACTACGGGTG | EWSYLRGGLTTLDRDYGWINNVH |
| | | GATCAACAACGTACACCATGACATTGGAACCCATGTCATTCATCATCTTTTCCCACAAATCCCACATT | HDIGTHVIHHLFPQIPHYHLVEA |
| | | ACCATCTTGTCGAGGCGACTGAGGCCGCAAAACCAGTGCTGGGAAAATATTACAAAGAGCCAGAGAAA | TEAAKPVLGKYYKEPEKSAPLPF |
| | | TCAGCTCCCCTCCCATTCCACTTACTTGGAGTGCTAGCCAAGAGCTTAAACAGCGACCACTATGTTAG | HLLGVLAKSLNSDHYVSDTGDVV |
| | | TGACACCGGAGACGTAGTGTACTACCAAACTGACTTGAAAACTAGTTCTTCTGCACAAAGCTCGGATT | YYQTDLKTSSSAQSSD* |
| | | GA SEQ ID NO: 129 | SEQ ID NO: 130 |
| 66* | Xa21_OsI_11115 | ATGGCGCACGCGTCTCCCTCTCCCATGGACTGCCACCACCACCGCCGCCAGCTGCTGCTGCGCTCCCC | MAHASPSPMDCHHHRRQLLLRSP |
| | | GTCGCGGAGGTCCTCGCCGCCGGGGGCCCCGGCCCACGCCGACGAGCGCCTCCACCACCACCGCTTCC | SRRSSPPGAPAHADERLHHHRFL |
| | | TCCGCCCCGGCGCGCTCGCGCGGCTGCGCGACTCCAAGGTCATCGCCCGCTCGCTCCGGTCCGCCGCC | RPGALARLRDSKVIARSLRSAAA |
| | | GCCGCCGCGGCGGTGGCCGCGGTGGAATCGGATCCGAGGAACGAGGTGGAGGAGGACGGCGAGGAGTT | AAAVAAVESDPRNEVEEDGEEFA |
| | | CGCGGTGTACTGCCGGAGGGGAAAGGGGAGGAGAAGGGTGGAGATGGAGGACCGGCATGTGGCCAAGG | VYCRRGKGRRRVEMEDRHVAKVA |
| | | TCGCCCTCGGCGGAGACCCCAAAGTGGCCTTTTTTGGTGTATTCGATGGCCACGGCGGGAAAAGCGCG | LGGDPKVAFFGVFDGHGGKSAAE |
| | | GCGGAATTCGTCGCCGAGAACATGCCCAAGTTCATGGCCGAGGAGATGTGCAAGGTGGACGGCGGCGA | FVAENMPKFMAEEMCKVDGGDSG |
| | | CAGTGGCGAGACTGAGCAGGCAGTGAAGCGGTGCTACCTGAAGACGGACGAGGAATTCCTCAAGAGGG | ETEQAVKRCYLKTDEEFLKREES |
| | | AGGAGAGCGGGGGCGCCTGCTGCGTCACCGCTTTGCTGCAGAAAGACGGCCTCGTTGTGTCTAATGCC | GGACCVTALLQKDGLVVSNAGDC |
| | | GGAGATTGCCGTGCCGTTCTCAGCCGCGCCGGGAAGGCAGAGGCGCTCACCTCTGATCACCGGGCCTC | RAVLSRAGKAEALTSDHRASRED |
| | | GCGCGAGGATGAGAAGGAAAGAATTGAGAATCTGGGTGGATTCGTGGTGAATTACCGAGGAACATGGC | EKERIENLGGFVVNYRGTWRVQG |
| | | GAGTCCAGGGCTCCTTGGCAGTGTCAAGAGGCATCGGTGATGCACACCTCAAGCAGTGGGTGGTGTCT | SLAVSRGIGDAHLKQWVVSDPDT |
| | | GATCCAGACACCACAACTCTGGGTGTTGATTCGCAGTGCGAATTCTTGATTCTTGCCTCTGATGGTTT | TTLGVDSQCEFLILASDGLWDKV |
| | | GTGGGACAAGGTGGAGAACCAGGAGGCAGTTGACATTGCCAGGCCGCTTTGCATCAGCAACGACAAAG | ENQEAVDIARPLCISNDKASRMT |
| | | CTTCTCGCATGACTGCTTGCAGGAGGCTCGTCGAAACTGCGGTTACTAGGGGCTCGACTGACGATATC | ACRRLVETAVTRGSTDDISIVII |
| | | AGCATTGTGATCATACAGCTGCAGCAATTCTCAAGATAA | QLQQFSR* |
| | | SEQ ID NO: 131 | SEQ ID NO: 132 |
| 67 | Xa21_OsI_11192 | ATGGCGGGGTGTACTGTTGTTGTATTTGGGGTTCTGGTGCTGGTCGCGGGGATGGCGGCGGCGCAGGG | MAGCTVVVFGVLVLVAGMAAAQG |
| | (Os03g0301200) | GCAGGTGCCGTCGCCGACCCCCGCGGCGGCGGCGGCGGCACCGGCGCCCGCGCCGGACTGCAACGGCA | QVPSPTPAAAAAAPAPAPDCNGI |
| | | TCCTGCTCACCTACAACTTCGAGGGCCGCGCCAAGATCCGGCCCTACGTGGCGGACAGGAACAAGCAG | LLTYNFEGRAKIRPYVADRNKQP |
| | | CCCTACTCGTTCAGGGCCAACGCCACCGTGCTCAACTCCGGGACGCGCCCGCTCAAGTCGTGGGCGAT | YSFRANATVLNSGTRPLKSWAML |
| | | GCTCGTGACGTTCGGGTACAGGGAGATCCTCGTCGGCGTCGACGGCGCCGTGCTCACCGGCGGCGGCG | VTFGYREILVGVDGAVLTGGGEM |
| | | AGATGCCGTACAACACCACCCAGGACGCCGGCAACGCGACGTCGTTCTCCGGCTACCCGCAGACCGAC | PYNTTQDAGNATSFSGYPQTDLL |
| | | CTCCTCACCCCGATCGCCACCGCCGGGGACATCTCGCAGATCCAGGCTTCGGTCGGCATCGTCGGCAC | TPIATAGDISQIQASVGIVGTLF |
| | | GCTCTTCGCCGGGCCAGGGCCGTTCGTGCCGCTCCCCACGGCGCTGTCGCTCGACGACCCGGCGTACA | AGPGPFVPLPTALSLDDPAYRCP |
| | | GGTGCCCCCAGGCGACCAATGTTTCCTCCGGGGTGCTCTCCACCTGCTGCGTCCTCACCCCGGAGGCG | QATNVSSGVLSTCCVLTPEAEAN |
| | | GAGGCCAACGCCACCGTCATCGACGCCAACGCCACCGACCCGACCAAGAACTTCCTCCCCCGCGGCAC | ATVIDANATDPTKNFLPRGTGDL |
| | | CGGCGACCTCGTCATCACCTACGACGTGCTCCAGGCCTACCCCTCGAGCTACCTCGCGCTCGTCACGC | VITYDVLQAYPSSYLALVTLDNN |
| | | TCGACAACAACGCCAAGCTCGGCCGCCTCGACAACTGGCGGCTTTCCTGGGAGTGGCGGCGCGGCGAG | AKLGRLDNWRLSWEWRRGEFIYS |
| | | TTCATCTACTCGATGAAGGGTGCGTACCCATCGGAGAAGGACACGACCGGCTGCATCTACGGGGCGGC | MKGAYPSEKDTTGCIYGAAGQYY |
| | | AGGGCAGTACTATCAGAGCCTTGATTTCTCCCAGGTGCTCAACTGCGACAAGAAGCCGGTGATCCTTG | QSLDFSQVLNCDKKPVILDLPLS |
| | | ACCTGCCTCTCTCCAGGTACAATGACACCCAGATTGGGAAGATTGACCATTGCTGCAGGAATGGCACA | RYNDTQIGKIDHCCRNGTILPKS |
| | | ATCTTGCCCAAGTCCATGGATGAGACGCAGTCGAAATCAGCCTTCCAAATGCAGGTGTTCAAGATGCC | MDETQSKSAFQMQVFKMPPDLNR |
| | | ACCGGACCTGAACCGGACAAAGCTTTTTCCACCGGCCAATTTCAAGATAGCCGGTGCATCATCACTGA | TKLFPPANFKIAGASSLNPDYTC |
| | | ACCCAGACTACACCTGTGGCCAGCCGGTGCCCGTCAGTCCCACAGAGTTCCCTGATCCAAGCGGGCTT | GQPVPVSPTEFPDPSGLDSTTLA |
| | | GATTCAACGACTCTGGCGATCGCGACATGGCAGGTGGTTTGCAACATTACCACGAGTAAGGGGGCGAA | IATWQVVCNITTSKGAKPKCCVT |
| | | GCCGAAGTGCTGTGTGACCTTCTCGGCATACTACAATGATTCAGTGATCCCCTGCAACACCTGCGCCT | FSAYYNDSVIPCNTCACGCPANQ |
| | | GTGGGTGTCCGGCGAACCAGCGGGGTCCTACTTGCAGCACGACTGCTCAATCCATGCTCCTGCCACCC | RGPTCSTTAQSMLLPPEALLVPF |
| | | GAGGCGCTGCTTGTGCCGTTCAACAATCGCACACAGAAGGCATTGGCATGGGCCGAGTTGAAGCACTA | NNRTQKALAWAELKHYNVPKPMP |
| | | CAATGTGCCTAAGCCAATGCCTTGTGGCGATTACTGTGGTGTGAGCATCAACTGGCACATATCAACAG | CGDYCGVSINWHISTDYNKGWSA |
| | | ACTACAACAAGGGATGGAGCGCTCGGATGACATTGTTCAATTGGGACAATGTCGACTTGGCGAACTGG | RMTLFNWDNVDLANWFAAIVMDK |
| | | TTTGCTGCTATTGTCATGGACAAGGCTTATGATGGTTTTGAGAAGGCGTACTCTTTCAATAGCACATC | AYDGFEKAYSFNSTSVGKNTIFM |
| | | AGTTGGCAAGAACACCATCTTCATGCAAGGTCTTGAGGGGCTCAATTACCTGGTGAAGCAGACCAACA | QGLEGLNYLVKQTNMSGSDYLVP |
| | | TGAGTGGATCAGACTACCTTGTTCCTGGGAAGCAGCAGTCAGTGCTCTCATTCACCAAGAAGCTGACT | GKQQSVLSFTKKLTPSINVVAGD |
| | | CCTAGCATCAATGTTGTTGCTGGAGATGGTTTCCCTTCAAAGGTCTTCTTCAACGGCGACGAGTGCGC | GFPSKVFFNGDECAMPQRIPMSN |
| | | GATGCCTCAGAGGATTCCAATGAGCAATAGTGGATTCAGGACCCATCTCAGCAGTGTCCTCTCACTGG | SGFRTHLSSVLSLVLVLAASAFV |
| | | TTTTGGTCCTGGCTGCTTCGGCCTTCGTATTGCTTCAGCAATAG | LLQQ* |
| | | SEQ ID NO: 133 | SEQ ID NO: 134 |
| 68 | Xa21_Os03g0302200 | ATGGGGAAGGGAGGGGAAGGGGCGGTTCCCGTGGGGGAGAGCGGCGGGCGGCGGCGGAGGAGGCTGGG | MGKGGEGAVPVGESGGRRRRRLG |
| | | CGAGGACGGAGGCGACGACGACGACGAGGAGTATGTGGTGGAGGAGGATGAGGAGGAAGAGTGCGACG | EDGGDDDDEEYVVEEDEEEECDE |
| | | AGGATCTGTCTGCCTCGAGCGCCGGCGAGGGAGGAGGAGAGGGCACAGACGAGGAATACGAAGAGGGT | DLSASSAGEGGGEGTDEEYEEGD |
| | | GATGAGGACGAAGAGGAGGATGAGACCCCGCGGCCGAGGCAGCCTGTCAAGAGCCGCGAGAATGGGCA | EDEEEDETPRPRQPVKSRENGQK |
| | | GAAGGGGAAGGCAGACCCACCCGTGGCGCGATCTCGACGACGTAAGTACGAGGATGACGATGACTACT | GKADPPVARSRRRKYEDDDDYSE |
| | | CGGAAGAAGAAGACGATGGGGTCGACGAGTACGACGAGGATCTTGAGGAGGAGGAAGAGGAGGACGAT | EEDDGVDEYDEDLEEEEEEDDEA |
| | | GAGGCGCCACGATCCAAGCGCGTGAAGAAACGTGGTGGCCGCAACGTGGAGGGGAAGCTTTCTCCGGA | PRSKRVKKRGGRNVEGKLSPERS |
| | | GCGATCAAATCGCCGGAGGTACGAGGAGGACATGGACTTTGACCCTGACATGGATGAGGAGGAAGAGG | NRRRYEEDMDFDPDMDEEEEEDV |
| | | AGGATGTTGATTTCGATCCTGAAGTGGAGGATGAGGAGGAAGAAGATTTTGAGGATGAGGAAGAGGAT | DFDPEVEDEEEEDFEDEEEDELE |
| | | GAATTGGAAGCGACTAAGGTGAGGGTTAAGAATATGGGGCGGCAAAAGTCTGCTTTGAATCAGCGACG | ATKVRVKNMGRQKSALNQRRGKK |
| | | AGGGAAGAAGAAGAGCAGCTCTAAGGTGGCCAGCCGGAAGGTGGGTTCAGTGAAGGCAAGGAAGGCTG | KSSSKVASRKVGSVKARKAASAR |
| | | CTTCTGCAAGACGGAGGCAGAAAAAGCGTTCAATGCTTGATCGTTATGAGGATGACGACTTCATTGTG | RRQKKRSMLDRYEDDDFIVEDEV |
| | | GAGGACGAGGTTACGGCTGATTGGCAACCAAGGAAAAAGGCTAGAATTAGGAAGCAGATGGAGGTTGA | TADWQPRKKARIRKQMEVDPPTP |
| | | TCCTCCGACACCAGTTTTTGAGGCTGAGATATGGCCTACTATTGATTCAGACACGACAGACTTCGAAT | VFEAEIWPTIDSDTTDFEFVTSD |
| | | TTGTAACATCCGATGAGGAAGCAGCCATTGCTGAGCCTACTAGGGTTATTAAGAAGGGGAGGAAGAAA | EEAAIAEPTRVIKKGRKKRVFVS |
| | | AGGGTATTTGTGTCAGATTCATCCTCAGATTCTGAATTCGTTGTATCAGATAAGGAATTGGGGAATTT | DSSSDSEFVVSDKELGNLKESEP |
| | | GAAGGAGTCTGAGCCTCCAGAGTCTCTGAAAGTGCTGCCTTCATCACCCAGGAAGATTTCTGTTACAG | PESLKVLPSSPRKISVTGNGEHK |
| | | GTAATGGGGAGCACAAGGGGAAGGAGAAAAAGGAACCACAGGAGGCTGGAAGGGCAACGTGCGGGATT | GKEKKEPQEAGRATCGICLSEEQ |
| | | TGCCTTTCTGAAGAACAGAGAGTGACTGTGCAGGGTGTGCTGGATTGCTGTTCACACTATTTTTGCTT | RVTVQGVLDCCSHYFCFACIMQW |
| | | TGCATGCATCATGCAATGGTCTAAGGTTGAGTCAAGGTGTCCATTGTGTAAACGGCGGTTCACAACAA | SKVESRCPLCKRRFTTITKSSKE |
| | | TCACAAAGTCGTCAAAGGAGGATACTGGTTTGGAACTGACAAATTCTGTAATTAGGGTTGAAGAACGT | DTGLELTNSVIRVEERDQVYQPT |
| | | GATCAGGTTTATCAGCCTACGGAAGAGGAAATAAGACGTTGGCTAGATCCATACGAGAATGTTGTGTG | EEEIRRWLDPYENVVCIECNQGS |
| | | CATAGAGTGCAATCAAGGTAGTGATGACAGTCTCATGTTACTATGCGATATTTGTGACTCCTCAGCAC | DDSLMLLCDICDSSAHTYCVGLG |
| | | ATACTTACTGTGTTGGTTTGGGAAGAGAAGTACCTGAAGGAAATTGGTACTGTGGAGGTTGTAGACTC | REVPEGNWYCGGCRLDGEAHSYH |
| | | GATGGCGAAGCACATTCATACCATAATCATGTGAATGGCAATTCTGGGATGTTTGGTGCAATTTCACC | NHVNGNSGMFGAISPIGTFERQG |
| | | AATTGGCACTTTTGAAAGGCAGGGGATTGATCTAAATGTATCTCCAAGAGAGATTCCTAGGGGAAATC | IDLNVSPREIPRGNHSVESQAST |
| | | ATTCTGTTGAGTCTCAAGCTTCTACTGCAGGAGCATCAACTCCATCTGGAAGGCAGACAAACGCAACG | AGASTPSGRQTNATNFRRRQMHD |
| | | AATTTTAGAAGACGTCAAATGCATGACTGGATACGCAGTTTGCTTTCTAGACCAAGGACAACACTTGG | WIRSLLSRPRTTLGPVMHHNGVH |
| | | GCCAGTTATGCATCATAATGGTGTGCATCAGAGTGGTTTTGTACCAAGCACTGAACCAGACCACATGA | QSGFVPSTEPDHMNFCAPLESDT |
| | | ACTTTTGCGCACCATTAGAATCTGACACTTTACACAACACTGGGTCTGTACCACGAAGTGAACCAAGC | LHNTGSVPRSEPSQNFHVMSEAN |
| | | CAGAACTTCCATGTTATGTCAGAAGCCAACACTTCAGAGACTTCCTTTGGAAGGCATGCAGCTCTTTC | TSETSFGRHAALSERRQIYERFF |
| | | TGAAAGACGTCAAATTTATGAACGTTTTTTCATGTTGCTATCTAGACCAAGCCCGACTATTAGACCGG | MLLSRPSPTIRPDLCHNASEHGS |
| | | ACTTGTGCCATAATGCCTCAGAGCATGGTAGTTCTATACCAAGAGTTGAACCAAACCACATGAACTTT | SIPRVEPNHMNFHAPPVANSPQT |
| | | CATGCTCCGCCAGTAGCCAACAGTCCACAAACTCTGCTTGATGGCATTCCAAACCGCAGCAATGGTTT | LLDGIPNRSNGFSFTQAHSNFVD |
| | | TTCTTTTACTCAGGCCCACAGTAATTTTGTAGATGGAAACAACTTCCAAGGAACTGAAGGTGTCTAG | GNNFQGTEGV* |
| | | SEQ ID NO: 135 | SEQ ID NO: 136 |
| 69 | Xa21_Os03g0306700 | ATGTCAGTTGCGCCGGCGACGGAAGGGTCCGCACGCCGCTCGGCGGCGGCGGCGGCGGAGGAGGAGGA | MSVAPATEGSARRSAAAAAEEEE |
| | | GGAGCGGCAGCGCAACCGGAAGAGGTCGAACCGGCTGTCGGCGCAGAGGTCCCGCATGAAGAAGCAGC | ERQRNRKRSNRLSAQRSRMKKQQ |
| | | AGTACGTGGACGGGCTGGCCGTGGAGGCGGAGCAGCTCCGGCGGGAGAACGACGCCATGCGCGCCGCG | YVDGLAVEAEQLRRENDAMRAAA |
| | | GCCGGCGCCGTGCTGCAGCGGTGCCGCCTGGTCGAGCAGGAGAACCGGGTGCTCGCCGCGCACGCGCG | GAVLQRCRLVEQENRVLAAHARE |
| | | CGAGCTGTGCAGCGCGCTCCAGCTCCGCGCCTCGCAGCTCCCCCTGCTCGGGGAGGTGGCAGGCGTGC | LCSALQLRASQLPLLGEVAGVPL |
| | | CCCTCGACGTGCCCGACGTCGCCGACCACCTCGTGCAGCTCTACGGCGGCGGCCTGGGGATGACGCCG | DVPDVADHLVQLYGGGLGMTPLS |
| | | CTCTCGCCACCGCCGCTGCTGCCGCCGCTGCCGCCGCAGATCGAGATGCTGTTCTTCCAGCCAGACTC | PPPLLPPLPPQIEMLFFQPDSVM |
| | | GGTCATGGATCCGGTCAGTATGCTGCAGGGCTACGAAAACATATGA | DPVSMLQGYENI* |
| | | SEQ ID NO: 137 | SEQ ID NO: 138 |
| 70 | Xa21_Os03g0310800 | ATGTGTCCCGGAGGCAGATACGCGGGCCTCGACGTCCCCGCCTGCGCGGCGGCGGGAGACCTGAGGCC | MCPGGRYAGLDVPACAAAGDLRP |
| | | GGCGTTCGACGTGCTGGACGCGGACCGCGACGGCCGCATCAGCCGGGAGGACCTCAAGTCGTTCTACG | AFDVLDADRDGRISREDLKSFYA |
| | | CCAGCGGCGCGGCCACCAGCGAGCGGTTCGACGACGAGGACATCGCCGCCATGATCGCCGCAGCCGAC | SGAATSERFDDEDIAAMIAAADA |
| | | GCGGACAACGACGGGTTCGTGCAGTACGACGAGTTCGAGCGCCTGCTGGGGCGCGCCGCCGCGGGGGC | DNDGFVQYDEFERLLGRAAAGAG |
| | | GGGGTGCCGGCCCGCGATGGAGGACGTGCTCCGGGTGATGGACCGCGACGGGGACGGCAAGGTGGGGT | CRPAMEDVLRVMDRDGDGKVGFD |
| | | TCGACGACCTCAAGGCGTACCTCGGCTGGGCCGGGATGCCGGCGGCCGACGAGGAGATCCGCGCCATG | DLKAYLGWAGMPAADEEIRAMIR |
| | | ATACGCGTGGCCGGCGGCGGCGACGGCGATGGCTGCGTGGGGCTCGAGGAGCTCGCCATCGTCCTCGG | VAGGGDGDGCVGLEELAIVLGCS |
| | | CTGCTCGCCCACAAATTGGACCGCATCCTCTCAAACTCTGCATTGA | PTNWTASSQTLH* |
| | | SEQ ID NO: 139 | SEQ ID NO: 140 |
| 71 | Xa21_OsJ_10653 | ATGGCGGCGCAGGGGATCGCGGAGGCGGTGCAGGCCTACACGGGCCTCTCCCCGGCGGCGGCCGTCAC | MAAQGIAEAVQAYTGLSPAAAVT |
| | (Os03g0321000) | CATCCTGGCCCTCATGCTCGCCACCTACCTCCTCGTGTCCTCCCTCTTCGTGGGCGAGATCACGCTCG | ILALMLATYLLVSSLFVGEITLE |
| | | AGCAGCTCGCGGCCTACGACGGCAAGGACCCCGCGAAGCCGATCCTCATCGCCATCCGCGGCCACGTC | QLAAYDGKDPAKPILIAIRGHVY |
| | | TACGACGTCACGCGCGGGAGGCTCTTTTATGGTCCTCAAGGACCATATTCCTTGTTTGCTGGGAGGGA | DVTRGRLFYGPQGPYSLFAGRDA |
| | | TGCAACTCGGGCCCTTGCATTGATGTCGTTTGACCCTATTGACCTCACTGGAGATTTGGATGGCCTTG | TRALALMSFDPIDLTGDLDGLGP |
| | | GTCCAGACGAGCTAGAGGTCTTGCAAGATTGGGAAGATAAGTTTAAAGAGCGGTATCCTACGGTGGGC | DELEVLQDWEDKFKERYPTVGHL |
| | | CACCTTGCTTCAGAAAATGCAGCGGATGGTAACCACGGTGGCGCAGCTTGA | ASENAADGNHGGAA* |
| | | SEQ ID NO: 141 | SEQ ID NO: 142 |
| 72 | Xa21_OsI_11859 | ATGGCGGAGACGCGCAAGTTCTTGATGCCCAACCAGCCCCCAGATATTTCGCAGATGGTGCTGGAGGC | MAETRKFLMPNQPPDISQMVLEA |
| | | TAGGAAGCGATGGTTGCGACCCACTGAAATATGCGAAATACTTTCAAACTACAGGAGTTTCTCTCTCT | RKRWLRPTEICEILSNYRSFSLS |
| | | CGCCTGAGCCACCAAACAGGCCCGGAAGTGGCTCTCTTTTTCTATTTGACCGCAAAACATTAAGATAC | PEPPNRPGSGSLFLFDRKTLRYF |
| | | TTCAGAAAGGATGGGCATAACTGGAGGAAGAAAAAGGATGGGAAGACCGTTAAAGAAGCTCACGAGAA | RKDGHNWRKKKDGKTVKEAHEKL |
| | | ACTAAAAGCTGGCAGCATTGATGTTCTACACTGCTACTATGCTCATGGGGAGGAAAATGAGAACTTCC | KAGSIDVLHCYYAHGEENENFQR |
| | | AAAGAAGGACCTATTGGCTGTTGGAAGAGGATTTCACGCACATTGTTCTCGTACACTATCTTGAAGTC | RTYWLLEEDFTHIVLVHYLEVKG |
| | | AAGGGTGTAAAGCAAAGTTTTAGTCGTGCTAAAGAAGAAATTATGCAGTTATCTGGTGCTGATAGTCC | VKQSFSRAKEEIMQLSGADSPSC |
| | | ATCGTGTTCAAATTCGATTACTAGTCAGAACCAGATGACCCCACAAATAATGGATGCAGCTGAAAGCC | SNSITSQNQMTPQIMDAAESPIS |
| | | CAATTAGTGGGCAGATTTCAGAGTATGAAGGTGCTGAACCAGCGAAATTCGGTGCAGCAGATAATTGC | GQISEYEGAEPAKFGAADNCRAS |
| | | CGAGCAAGCTCCAGATACAACCCTCTCATTGAGATGCAGCAGCCTCTGGATGGAATCGTGATGGATAG | SRYNPLIEMQQPLDGIVMDNILY |
| | | CATTTTATACCCTTCTGCTTCAGCCATCTGTAACCAAGTTTCAGGTTATCATGGTGAATTGCCACCAG | PSSSAICNQVSGYHGELPPGTSN |
| | | GAACATCTAATCTAAATGGTCATACGTTTACTCACAGTGACATAGCTAGAATGTTTGATGATTCCAGC | LNGHTFSHSDIARMFDDSSSGLR |
| | | TCTGGGCTAAGAGACATTTCCAGAACCCTGTTTGATTCAATGCCTTACGATGAGCATTTATCAGGATA | DISRTLFDSMPYDEHFSGYANGF |
| | | TGCAAATGGATTCATGGAGCCAACTCTTCATTCTTCATTTTCCATGATAGAGGCTAACAATCTGGAGG | MEPTLHSSFSMIEANNLEDSSLL |
| | | ATAGCTCTCTTCTGGAGACATTTACATCTGAAGCTCTTTACACTAACAACCTCAGCCAGAAGGAAGCT | ETYTSEALYTNNLSQKEADALSF |
| | | GATGCACTAAGTTTTGCTGGCATATCATCGCCAGAGGTGAATGGTAATAAATATACTGAAGGAAGCAC | AGISSPEVNGNKYTEGSTKHPLL |
| | | CAAGCATCCACTCCTGAAGCAATTGTCATTAGATCTATTTAAGATTGAGTCTTCTGGTTTAAAGAAAC | KQLSLDLFKIESSGLKKHDSFSR |
| | | ATGACAGCTTTTCAAGGTGGATGAGTAAAGAACTTGGAGAGGTGGTTGATTTGGGTATCAAATCAAGT | WMSKELGEVVDLGIKSSSDALWS |
| | | TCTGATGCTCTCTGGAGTAGCATTGAGATTGTGAATGCTGCTGATGGTCCTAGTACACCAATTAATGA | SIEIVNAADGPSAPTNEQLDAYA |
| | | ACAGTTAGATGCTTATGCAGTGAGCCCTTCACTTGCGCAAGACCAACTATTCAGCATTCTTGACATTT | VSPSLAQDQLFSILDISPSCSYI |
| | | CACCAAGCTGCTCATATATTGGTTTGAAGACAAAGGTTCTGGTAACTGGTACATTCCTGGCAAGTAAA | GLKTKVLVTGTFLASKENVENCK |
| | | GAGAATGTGGAAAATTGCAACTGGTCATGCATGTTTGGGGATGTTGAAGTACCAGCTGAGGTTTTAGC | WSCMFGDVEVPAEVLADGSLRCY |
| | | TGATGGTTCCCTACGCTGCTATGCACCAGAACATCAATCTGGAAGAGTTCCCTTTTATGTGACATGCT | APEHQSGRVPFYVTCSNRIACSE |
| | | CAAACAGGATCGCTTGTAGTGAAGTGCGAGAATTCGAGTACCGGGATTCTGATGCTCAGTACATGGAG | VREFEYRDSDAQYMETSHSQANG |
| | | ACATCACATTCTCAAGCCAATGGTATAAATGAAATGCATCTACAAATTCGTCTTGAGAGGCTACTCTC | INEMHLQIRLEKLLTLGPDDNQL |
| | | TTTGGGGCCAGATGACAATCAACTGCTTGTTTGTGGAAATGAAAAACTTGAGTTAATCAATGCTATAA | LVCGNEKLELINAINSLMLDEKW |
| | | ACTCCCTGATGCTCGATGAGAAATGGTCAGATCAGGGATCGCCATCCGGCTCTAAAGATGTTGTCACC | SDQGSPSGSKDVVTPRNQSLKKL |
| | | CCAAGGAACCAAAGTTTAAAGAAATTGATGAAAGAAAAGCTTCATTGTTGGCTTATCTATAAAATAAA | MKEKLHCWLIYKIYDCEKGPNIL |
| | | TGATTGTGAGAAGGGCCCAAATATACTGGGAAAGGAAGGACAGGGTATAATTCATTTGGTGGCTGCAC | GKEGQGIIHLAAALGFDWAIRPI |
| | | TGGGCTTCGATTGGGCTATAAGGCCAATACTAGTTGCTGGTGTCAATGTGAACTTTCGGGATGCTCAT | LVAGVNVNFRDAHGWTALHWAAS |
| | | GGATGGACTGCTCTTCATTGGGCTGCGTCTTGTGGAAGAGAGCGAACAGTGGGCGTCCTTATAGCAAA | CGRERTVGVLIANGAAAGALTDP |
| | | TGGAGCTGCAGCAGGTGCATTGACAGATCCTACTTCTGAATTTCCTTCTGGAAGAACTCCAGCCGATT | TSEFPSGRTPADLASTNGHKGIA |
| | | TAGCCTCTACAAATGGACACAAGGGAATTGCTGGTTTTCTCGCGGAATCTGCTTTGACAAGCCATCTA | GFLAESALTSHLSALTLKESKDS |
| | | TCAGCACTATCTTTAAAGGACTCAAAAGATAGCAATGTGGAAGAAGCATGTGGATTAACAATTCCTGA | NADEACRLTIPEDLPEMNYGQLA |
| | | AGATCTCCCTGAAATGTATTCTGGTCAGCTTGCTGTACAGGATTCTCATGCTGAATCATTGAAGGATT | VQDSHAESLKDSLSAVRKSAQAA |
| | | CATTAAGTGCTGTTCGTAAATCCGCTCAAGCTGCAGCTAGGATATTCCAAGCCTTCAGGGTGGAATCA | ARIFQAFRVESFHRKKVVEYGDD |
| | | TTCCACAGAAAGAAGGTCGTGGAATATGGAGATGATGATTGTGGATTATCTGATGAACACACATTTTC | DCGLSDEHTFSLISLQKVKQGQH |
| | | ACTTATTTCTCTTCAAAAGGTCAAACAAGGGCAACATGATACACGTTTGCATTCTGCTGCTGTACGTA | DTRLHSAAVRIQNKFRGWKGRKE |
| | | TCCAAAATAAGTTCCGAGGATGGAAGGGAAGAAAGGAGTTTATGATCATTCGCCAGAGAATTGTGAAG | FMIIRQRIVKLQAHVRGHQVRKN |
| | | TTACAGGCTCATGTGCGAGGACATCAAGTGAGGAAAAACTATAAAAAAGTAGTCTGGTCAGTAGGTAT | YKKVVWSVGIVEKVILRWRRKGR |
| | | TGTCGAGAAAGTTATATTGAGATGGAGGAGAAAGGGACGTGGTTTGCGTGGCTTTCGACCTGAGAAAC | GLRGFRPEKQLEGQTQIQPAKTE |
| | | AATTAGAAGGCCAAACACAAATCCAACCTGCAAAAACAGAGGATGAATACGATTACTTGCAGGATGGC | DEYDYLQDGRRQAEGRLQRALDR |
| | | AGAAGACAGGCTGAAGGCAGACTACAGAGGGCACTGGACCGGGTGCGCTCTATGACACAATACCCAGA | VRSMTQYPEAREQYRRLTTCVAE |
| | | AGCAAGAGAACAGTACCGTAGGCTTACAACTTGTGTTGCTGAAATGCAACAGTCCAGGATGATGCAGG | MQQSRMMQDEMLSEAAGADGSDF |
| | | ACGAGATGTTAAGTGAGGCAGCTGGTGCTGACGGAAGTGATTTCATGAATGGACTGGAGGACTTGATA | MNGLEDLICRDDPQMTAIW* |
| | | TGCAGAGACGACCCCCAAATGTCTGCCATTTGGTGA SEQ ID NO: 143 | SEQ ID NO: 144 |
| 73 | Xa21_Os03g0645900 | ATGGCGACGATCACGACGCCGGGATATGCTCACATACAGCGGCAGCACGGCAGGTGCTCGACGACGGC | MATITTPGYAHIQRQHGRCSTTA |
| | | GGGAAGGCGTGGGGCGTCCAATTCGGTGAGATTCTCCGCGCGCGCGGTTAGCTCCGTGCCGCACGCGG | GRRGASNSVRFSARAVSSVPHAA |
| | | CGGCGGCGTCGTCATCGGCGCCGGCGTTCCTGCCGGTGCCGTTCGTGCCTGGGGCCGACGCGCCGTCG | AASSSAPAFLPVPFVPGADAPSP |
| | | CCGTCGGGGAAGAGTGCCATTGGCGTCCCGAAGGCGCCGAGGAAGGGGGAGGAGGGGAAGAGGCTCAA | SGKSAIGVPKAPRKGEEGKRLNF |
| | | CTTCTTCCAGCGCGCCGCGGCGATGGCGCTCGATGCGTTCGAGGAAGGGTTTGTGGCGAATGTCCTCG | FQRAAAMALDAFEEGFVANVLER |
| | | AGCGCCCGCACGGGCTGCCGAGCACGGCCGACCCCGCGGTGCAGATCGCCGGCAACTTCGCGCCGGTC | PHGLPSTADPAVQIAGNFAPVGE |
| | | GGTGAGACGCCGCCCGCGCGCGCGCTGCCGGTGTCGGGGCGCATCCCGCCCTTCATCAACGGCGTCTA | TPPARALPVSGRIPPFINGVYAR |
| | | CGCGCGCAACGGCGCCAACCCGCACTTCGACCCCGTCGCCGGGCACCACCTGTTCGACGGCGATGGCA | NGANPHFDPVAGHHLFDGDGMVH |
| | | TGGTGCACGCCATCAGGATACGCAACGGCGCCGCCGAGTCGTACGCGTGCCGGTTCACGGAGACCGCG | AIRIRNGAAESYACRFTETARLR |
| | | CGGCTGCGGCAGGAGCGCGCGATGGGGCGGCCCATGTTCCCCAAGGCCATTGGGGAGCTCCATGGCCA | QERAMGRPMFPKAIGELHGHSGI |
| | | CTCCGGCATCGCGCGCCTTGCTCTGTTCTACGCGCGCGCCGCGTGCGGCCTCCTCGACCCGTCGCATG | ARLALFYARAACGLLDPSHGTGV |
| | | GCACCGGCGTCGCCAACGCCGGCCTCGTCTACTTCAACGGCAGGCTCCTCGCCATGTCGGAGGACGAC | ANAGLVYFNGRLLAMSEDDLPYQ |
| | | CTCCCCTACCAGGTGCGCGTCACCGCCGACGGCGACCTCGAGACCGTCGGCCGCTACGACTTCGACGG | VRVTADGDLETVGRYDFDGQLGC |
| | | GCAGCTCGGCTGCGCCATGATCGCGCACCCCAAGCTCGACCCGGCCACCGGCGAGCTCCACGCGCTCA | AMIAHPKLDPATGELHALSYDVI |
| | | GCTACGACGTGATCAAGAAGCCGTACCTCAAGTACTTCTACTTCGCGCCCGACGGCACCAAGTCGGCC | KKPYLKYFYFAPDGTKSADVEIP |
| | | GACGTCGAGATCCCGCTCGACCAGCCCACCATGATCCACGACTTCGCCATCACCGAGAACTACGTGGT | LDQPTMIHDFAITENYVVVPDHQ |
| | | GGTGCCCGACCACCAGGTGGTGTTCAAGCTCCAGGAGATGCTCCGCGGCGGCTCGCCCGTGGTGCTCG | VVFKLQEMLRGGSPVVLDKEKTS |
| | | ACAAGGAGAAGACGTCGCGGTTCGGGGTGCTCCCCAAGCACGCCGCGGACGCGTCGGAGATGGTGTGG | RFGVLPKHAADASEMVWVDVPDC |
| | | GTGGACGTCCCGGACTGCTTCTGCTTCCACCTCTGGAACGCGTGGGAGGAGGCGGACACCGACGAGGT | FCFHLWNAWEEADTDEVVVIGSC |
| | | GGTGGTGATCGGCTCGTGCATGACCCCCGCCGACTCCATCTTCAACGAGTCCGACGACCGCCTCGAGA | MTPADSIFNESDDRLESVLTEIR |
| | | GCGTCCTCACCGAGATCCGCCTCAACACCCGCACCGGCGAGTCCACGCGGCGCGCCATCCTGCCGCCG | LNTRTGESTRRAILPPSRQVNLE |
| | | TCGAGGCAGGTGAACCTCGAGGTGGGCATGGTGAACCGCAACCTCCTCGGCCGCAAGACGCGGTACGC | VGMVNRNLLGRKTRYAYLAVAEP |
| | | CTACCTCGCCGTGGCCGAGCCGTGGCCCAAGGTGTCGGGCTTCGCCAAGGTGGACCTCGCCACGGGTG | WPKVSGFAKVDLATGELTKFEYG |
| | | AGCTCACCAAGTTCGAGTACGGCGAGGGCCGGTTCGGCGGCGAGCCCTGCTTCGTCCCCATGGACGCC | EGRFGGEPCFVPMDAAAATPRGE |
| | | GCCGCCGCCACGCCTCGCGGCGAGGACGACGGCTACATCCTGTCCTTCGTCCACGACGAGCGCGCCGG | DDGYILSFVHDERAGTSELLVVN |
| | | GACCTCCGAGCTCCTCGTCGTCAATGCCGCCGACATGCGCCTTGAGGCCACCGTGCAGCTGCCGTCCC | AADMRLEATVQLPSRVPYGFHGT |
| | | GCGTGCCGTACGGCTTCCACGGCACGTTCATCACCGGCGACGAGCTCACCACCCAGGCCTGA | FITGDELTTQA* |
| | | SEQ ID NO: 145 | SEQ ID NO: 146 |
| 74 | Xa21_Os03g49430 | ATGGACGTCCTGAAGCGCGAGCTGCAGCGGAAGCGCCAGCTGCTCGACGCCGACTTCGGCGGCCGCAA | MDVLKRELQRKRQLLDADFGGRK |
| | (Os03g0701100) | GCTCCTCCGCCGCGCCGAGATCGAGCGCCGCGAGATGGAGCGGATCCGGGAGGCCGAGCGCCGGCTCC | LLRRAEIERREMERIREAERRLL |
| | | TCCTCCAGAAGCAGCTCCGGTCCTCCTCCTCCCACCACCGCGCCGCGTCGCGCTCCACGACCACGCCG | LQKQLRSSSSHHRAASRSTTTPG |
| | | GGGGCTCCCGACGGCGACGAGTCGTCGCGGGCCGAGCACCGGGGCGACGGGGAGGAGAAGGAGGACGC | APDGDESSRAEHRGDGEEKEDAP |
| | | GCCGCTCCTCCCCAGGGAGGAGGTCATCCGGCGCCTGCGCGTGCTGCGCCAGCCGGCGACGCTCTTCG | LLPREEVIRRLRVLRQPATLFGE |
| | | GCGAGGACGACGCCGCGCGCCTCCGCCGCCTCCACGCCGTGCTCGAGGACCCCGCGGCGCTCGCCGAC | DDAARLRRLHAVLEDPAALADVD |
| | | GTCGACGCGGCGGAGATCGGGGAGGGCCAGACCAACGACTTCCTCCGCGACATCCAGGCGCTGCGGGC | AAEIGEGQTNDFLRDIQALRAKT |
| | | GAAGACCGTCGCGGCGTCGGTGGCAGCGAAGCCCAAGGCTGGCGCTGCAACTGCAGAGAGCGGGGGCG | VAASVAAKPKAGAATAESGGEAR |
| | | AGGCGAGGGAGGAGGTACCGTTCGAGGAGCTCTCCGACGAGGACAAGATCATGGCCTTCTTCAAGAGG | EEVPFEELSDEDKIMAFFKRLMS |
| | | CTGATGAGCGAGTGGAGCCAGGAGATGGACGAGATGCCCGAGGCGGAGAGGCGGACGGCGAAAGGGAA | EWSQEMDEMPEAERRTAKGKAAV |
| | | GGCTGCGGTGGCCACCTGCAAGCAGTGCGCGCGCTATCTCGAGCCGCTGTTCAAGCTGTGCAAGAAGA | ATCKQCARYLEPLFKLCKKKVCD |
| | | AGGTATGTGACAGTATTAATTCACGCACACACTTAAGAATCTGA | SINSRTHLRI* |
| | | SEQ ID NO: 147 | SEQ ID NO: 148 |
| 75 | Xa21_Os03g0703400 | ATGTTCTCGTGGAGCCGTAAGCAGTCGTCCTCCTCCGGCCGCCGCGGCGCGGACGCGTCGTCGATGGA | MFSWSRKQSSSSGRRGADASSMD |
| | | CTCCAGCAGCCGCGGCGGCGGAGGGGAAGGGAGCGGGAGCGGGAGCCGCGGGCGTAGCTCGCGGCTGG | SSSRGGGGEGSGSGSRGRSSRLE |
| | | AGCGCCGCAACGCGGTGAAGCACATCGACTACGAGGCGGCGGGGGCGGGGGCGGGGGCGTCGTCCGTG | RRNAVKHIDYEAAGAGAGASSVP |
| | | CCGGCGTGCGCGTCGTGGTCGTCGTCCATGTCGGCGGAGCGGTCGCTGGGGCTCCGGCCGTCGCGCTC | ACASWSSSMSAERSLGLRPSRSL |
| | | GCTCGACCTGGCCGTCGGGGGCGGCGGCACGGACATCCGCATCAGCGGCAGCGTGGAGGGGGAGGTCG | DLAVGGGGTDIRISGSVEGEVDE |
| | | ACGAGCTGTGCCGCAGCCTGGGTTTATCGGGGCCGGAGGAGTTCGCGATCCCCGTCGCCGCATGGGAA | LCRSLGLSGPEEFAIPVAAWEAR |
| | | GCCCGGAAAGAGCGTTCTAACTCCGACCTACTACCGCGCTCCCGCTTCGTCTCCTCGCCACCCGTCGA | KERSNSDLLPRSRFVSSPPVDDP |
| | | CGACCCCTCTCCCATGGCCCGCACCATTTCCGCCCCCGAGGTCATCCAGTGCGACCTTCCTCCCTCAT | SPMARTISAPEVIQCDLPPSFPA |
| | | TCCCTGCTTCAATTCCTGAGGAGTCCCTCAATTCTTCCTCCAATTCCACCGCAACTGATTCGGCGGAG | SIPEESLNSSSNSTATDSAEEPT |
| | | GAGCCTACCGCTGCGGCGCTCGGTCAGGAATCCCCCAAGGCTGCCCCTGCCGTTGCTGCTGTGGCACC | AAALGQESPKAAPAVAAVAPLAG |
| | | CCTCGCTGGATTGCCCCTGCTATCGCCAAAGAGAGGAGGCGGCGAAGTCGGTATCCGAGGAGCCCGAC | LPLLSPKRGGGEVGIRGARPPVL |
| | | CTCCTGTGCTCTCCCCGCCTCAGCCGCTCATGGCACTCGCACCGCCGCCAATGAGGCGTTCAATTGTG | SPPQPLMALAPPPMRRSIVAKDM |
| | | GCTAAAGACATGAGCGGGGTGTCGGCTTGGGATATTGTGAACTCGTTTGCTCCCAGTGAAGAGAAAAG | SGVSAWDIVNSFAPSEEKSEVRT |
| | | TGAAGTGAGAACAGATGATGAACGCGTGGACGCGTCTCACATGTCGGACACCGAGGAGGAGGAGGAGT | DDERVDASHMSDTEEEEEFADEG |
| | | TTGCTGACGAGGGAGTGGCAGGGGTGGACGGGGAGCTGAAAGAGTTAAGGATAGGAGAGACCTTTGAA | VAGVDGELKELRIGETFEGFTGT |
| | | GGGTTCACTGGGACATCATCATTGTCAACAACAAATGATGATGATGCATCCAGCACAACTACGGAGGC | SSLSTTNDDDASSTTTEAMFIIS |
| | | TATGTTCATCATCTCACCAAATGGAAAGTTCAAGAGGAAGATTAAGTCGTGGATGCGTGGTGCTCTTC | PNGKFKRKIKSWMRGALLGSGSF |
| | | TGGGGAGCGGCTCATTTGGGATGGTGTATGAGGGCATCAGTGATGAAGGAGCGTTTTTTGCTGTGAAG | GMVYEGISDEGAFFAVKEVSLLD |
| | | GAAGTATCTTTGCTTGACCAAGGAAGCAACGCACAACAATCTATTCTTGCACTTGAACAGGAAATTGC | QGSNAQQSILALEQEIALLSQFE |
| | | ACTCCTAAGTCAGTTTGAACATGAAAATATAGTCCAGTATTATGGAACTGACAAGGAAGAATCAAAAC | HENIVQYYGTDKEESKLYIFIEL |
| | | TGTACATTTTTATTGAGCTTGTTACACAAGGTTCTCTATCGTCCCTCTATCAAAAGTATAAACTACGA | VTQGSLSSLYQKYKLRDSQVAAY |
| | | GACTCACAAGTGGCAGCATACACAAGGCAGATTCTCAACGGATTGGTTTATCTCCATGAGCGAAATGT | TRQILNGLVYLHERNVVHRDIKC |
| | | GGTTCACAGAGACATTAAATGCGCAAATATACTGGTTCATGCAAATGGATCAGTAAAATTGGCAGACT | ANILVHANGSVKLADFGLAKEMS |
| | | TTGGGTTGGCGAAGGAGATGTCAAAAATTAACATGCTGAGATCATGCAAAGGAAGTGTTTATTGGATG | KINMLRSCKGSVYWMAPEVVNPK |
| | | GCACCTGAGGTTGTTAATCCTAAAAAAACATATGGGCCCCAGGCTGATATTTGGAGTCTTGGCTGCAC | KTYGPQADIWSLGCTVLEMLTRN |
| | | TGTATTGGAAATGCTTACTCGTAACATACCATATCCTAATGTGGAGTGGACAAATGCTTTTTTTATGA | IPYPNVEWTNAFFMIGKGERPQI |
| | | TTGGAAAAGGAGAACGACCTCAAATTCCCAGCTATTTGTCAAAAGATGCTCAAGATTTCATTAGCCAG | PSYLSKDAQDFISQCVQVDPEQR |
| | | TGTGTACAAGTTGATCCAGAGCAACGGCCTTCTGCATCACAACTTATGTCACACCCATTTGTTAATAG | PSASQLMSHPFVNRPLRASFESA |
| | | ACCGCTTCGAGCTTCTTTTGAATCTGCATCCCCTCCTGCCATCAGCTCGTATTGA | SPPAISSY* |
| | | SEQ ID NO: 149 | SEQ ID NO: 150 |
| 76 | Xa21_OsJ_12397 | ATGACCAAGCCAGAAGCCCTGCAACTTCACCATCTGCCCGATGATGTCCTGCACCGCATACTGTCTCG | MTKPEALQLHHLPDDVLHRILSR |
| | (Os03g0722800) | ATTAACATTCAGAGAGTCCTCACGGATGGGCCTTCTTTCTCGCAAGTGGCAGAAACTGTGGAGAAGCT | LTFRESSRMGLLSRKWQKLWRSC |
| | | GCTGCCCGAAATTGATCTTCACCAGGGCCACCATGTTCAAGCCTGGGAATAAAACCATAAGACGTACA | CPKLIFTRATMFKPGNKTIRRTR |
| | | AGGACCAACTTTGCCAGGAGAGTCAACAGTCTTTTGCGGCAGCTATGTGCACCTCCTACCCTGAATAA | TNFARRVNSLLRQLCAPPTLNKF |
| | | GTTTGTTGTTAAGTTTGGGCTGCGCAGGAAACATACCTGCCATGTCAACAGATGGGTTGGCTTCTGCT | VVKFGLRRKHTCHVNRWVGFCSK |
| | | CCAAGTCGAGAGCAAGGCACATCACTTTTGATTTCACTCCTGGAGTGAAGGGTATTTTCAGGGGCTTA | SRARHITFDFTPGVKGIFRGLAD |
| | | GCTGATGAAAAGTACATCTTCCACCTGCATGTTTTCAGTGTCCCTGACCGCTCCCCTGCTCATATCAA | EKYIFHLHVFSVPDRSPAHIKSL |
| | | ATCCCTTCATCTGAGCTACGTCTGGTTGAACACAGCAACCACTGGTTTCACTGGCTTTGCAAACCTCA | HLSYVWLNTATTGFTGFANLKKL |
| | | AGAAGCTCACCCTGCACAAAGTTTCCTTTTTAAATGACTTCCAACATCTGATGCTGTCGGAGTGCACT | TLHKVSFLNDFQHLMLSECTALE |
| | | GCTCTTGAGTGGCTGAGCATCAGCTGCTCTTCCTTCACTGAGCTAACCTTGTGCAAGCCACTGCGCCG | WLSISCSSFTELTLCKPLRRLRY |
| | | TCTGCGTTATCTTTCTTTGCACTACTGCTACATGGAAAAGGTTGAGCTGGAAGCTCCAAACCTCACAT | LSLHYCYMEKVELEAPNLTSVDL |
| | | CGGTCGATTTGACCAATCGGCCAATTCCGTTGGCACTAAGTGAATCTCTGAAGGTGATGGAGGCAAAC | TNRPIPLALSESLKVMEANIKLL |
| | | ATTAAACTGCTACATAAGAGCGTGCTTTATGGTGATAATCTGGACTACATCTGCACCGAGCTTCCTGC | HKSVLYGDNLDYICTELPAALPH |
| | | CGCTCTTCCGCATGTGCAGAAACTCTCCATTACCTCGACACTCTGCATCTACGATGAGTTGCAAAGTT | VQKLSITSTLCIYDELQSFAKTS |
| | | TTGCCAAAACCTCAGTGAGATTCATCAATTTGAGGCATCTGAGCTTGTATTTGCCTCTTTATGGGGAC | VRFINLRHLSLYLPLYGDGRSVG |
| | | GGCAGGTCAGTTGGTGGGATTCTTCGTTTGGCCTACCTCTTGGAGCTCGCTCCAGTTCTAGAGGAACT | GILRLAYLLELAPVLEELELHFR |
| | | GGAACTGCACTTTCGCTTCTCTGATTTCGTCATCAGACAGGCGATCAGAGTGGATATGCTACCGTATC | FSDFVIRQAIRVDMLPYRHDKLK |
| | | GGCATGACAAGCTCAAGAGGGTGGTCATGTCTGGAGCCTGTCATTGGCAGGGGCTGATCGAGCTAGCA | RVVMSGACHWQGLIELAHHIRRC |
| | | CACCACATTCGTCGTTGTGCTAGTAGACTTGACTGTATGATCATGGATCCGATGGTTAGAATTAAGGG | ASRLDCMIMDPMVRIKGLPTVDW |
| | | TCTCCCGACGGTTGATTGGTTGGAGGAAAGAGGCCGCAGGATTGCCAAAGAGCTTCTTAAGAGGCAGG | LEERGRRIAKELLKRQEFQGVLT |
| | | AGTTTCAGGGTGTCCTCACTGTTTTGTGA SEQ ID NO: 151 | VL* SEQ ID NO: 152 |
| 77 | Xa21_OsJ_12449 | ATGGCTGCTCACCGCGTGGGGCGATGCATGCTCCTGCAACCACCGCGCCTCGCCACCTGCGTCCTCTT | MAAHRVGRCMLLQPPRLATCVLF |
| | (Os03g0730400) | CCTCCTGCTACCGCTGCTGCTGCTGCCGTGCTCGGCGTCGTCGTCGGTGATCACCCACCTCCCGGGCT | LLLPLLLLPCSASSSVITHLPGY |
| | | ACCACGGCCGCTTGCCGTTCCACCTTGAGACCGGGTACGTTGGTGTGGATGAGGAGACGGGCACTGAG | HGRLPFHLETGYVGVDEETGTEL |
| | | CTCTTCTACTACTTCGTTGAATCGGAGAGGAGCCCAAGTACAGACCCTGTGATCCTCTGGTTGACAGG | FYYFVESERSPSTDPVILWLTGG |
| | | CGGGCCTGGCTGCTCCGGATTCAGCGGTGTCGTCTTTGAAGTAGGACCTATGAAATACGTGTTGGAGC | PGCSGFSGVVFEVGPMKYVLEPY |
| | | CTTATAATGGTAGTTTGCCACAATTGGTTTATAATCGGTATTCATGGACACAGATGGCAAGCATCCTC | NGSLPQLVYNRYSWTQMASILFL |
| | | TTCTTGGACACTCCTGTTGGTTCTGGTTTCTCATACGCTCATGATCCTAAAGGTTATAATGTCGGGGA | DTPVGSGFSYAHDPKGYNVGDIS |
| | | CATATCATCGTCTTTGCAAGTCGTCACATTTCTGAAGAAGTGGTTCAATGATCACCCACGCTATCTCT | SSLQVVTFLKKWFNDHPRYLSNH |
| | | CAAATCATTTCTATGTTGGAGGAAGCTCATACGCTGGAAAGGTGATTCCAATTATCATGAAGTACATT | FYVGGSSYAGKVIPIIMKYISEV |
| | | TCAGAAGTTACAGGGGTAGTTGGCAACCCCATTAGAGGCTCGAAGATTGATGATAATTTCAAAATTCC | TGVVGNPIRGSKIDDNFKIPYSH |
| | | ATATTCTCATGGTGTTGGGATCATATCTGATCAATTATACGAGGCTGCAGTAGCAAACTGCAATGGAG | GVGIISDQLYEAAVANCNGDYVT |
| | | ATTATGTGACCACAACAAATGAATTATGTGCTAAGGCCCTAAATGCTATTGATAATCTCATGTCTGAA | TTNELCAKALNAIDNLMSEVDDG |
| | | GTTGATGATGGAAATATCTTGGATGATAAATGTGTTCGTGCTACACCAAAACCCATAAATGATGTTTC | NILDDKCVRATPKPINDVSRSRS |
| | | AAGAAGTAGGAGTCTGCTAGAAGATTACATTCGGCAAAGTGAGCCGACTGTTCGACCTACTATCAATT | LLEDYIRQSEPTVRPTINCFSYR |
| | | GTTTTTCATACCGTTACTATCTATCATTCTTGTGGATGAACAACAATATGACTAGAGAAGCTCTTAAG | YYLSFLWMNNNMTREALKIKKGT |
| | | ATCAAGAAGGGAACAGTCGGCGAATGGATAAGATGCAAGACAGGGCTACCCTATGTTAAAGATGTCGC | VGEWIRCKTGLPYVKDVASSIKY |
| | | AAGCAGCATCAAGTATCATTTTGACCTCACCACAGGAGGTTACCGGGCACTTGTGTTCAGTATTCCAT | HFDLTTGGYRALVFSIPCLKNYY |
| | | GTCTTAAAAATTATTATGACATTTATGAATGCAGTGGTGACCATGATCTCACGTTGCCATTTCTGAGC | DIYECSGDHDLTLPFLSTQAWIR |
| | | ACCCAGGCATGGATAAGATCCTTGAACTTCTCCATAGTTGATGAGTGGAGAGCATGGCATGTGGATGG | SLNFSIVDEWRAWHVDGQAAGFT |
| | | CCAGGCTGCAGGATTTACAATTTTGTACGCCAACAACTTGACCTTTGCCACAGTAAAGTGTCCAGCCC | ILYANNLTFATVKCPALHNSHTG |
| | | TTCACAATTCACATACTGGCTTTCTGAAGAATCCTAAACAAGGTTTATGA | FLKNPKQGL* |
| | | SEQ ID NO: 153 | SEQ ID NO: 154 |
| 78 | Xa21_Os03g0741100 | ATGCAAATGGAGTCGTACTACGGCGCGTTCCACGCCGACGAGGCCGCGTTCTTCTTCCCCCACCACGT | MQMESYYGAFHADEAAFFFPHHV |
| | | GCCGGCGTCGCCGGAGCTGCCGTTCGGCCTCATTGCGTCGCCGGAGCCGGAGCCGGAGCCGGCGGCGG | PASPELPFGLIASPEPEPEPAAA |
| | | CGGAGGAGGCGAGGCAGAGCGCGTTCCGGGAGTACGGCGGCGCGGTGCACGCCGGTGCGCCGGCGGCG | EEARQSAFREYGGAVHAGAPAAA |
| | | GCGGGGGCTGTCACCACCGGTGGGACGAACATCCACCGGAGGGTGATGGACGTGCTGGGGAGGATGGG | GAVTTGGTNIHRRVMDVLGRMGG |
| | | CGGCGGCGGCGGCGGCGGCGGAGGGGAGAAGGGGGAGGGGGAGGAGATGGAGGAGGAGGAGGAGGTGC | GGGGGGGEKGEGEEMEEEEEVPQ |
| | | CGCAGCGGCGGCGGCGCGGGCAGGGCGCCGACGTGGAGAGCAGCCGCGGTTTCCGCCACATGATGCGC | RRRRGQGADVESSRGFRHMMRER |
| | | GAGCGCCAGCGCCGCGAGAAGCTCAGCCAGAGCTACGCCGACCTCTACGCCATGGTCTCCTCTCGCTC | QRREKLSQSYADLYAMVSSRSKG |
| | | CAAGGGGGACAAGAACTCGATCGTGCAGTCGGCGGCGATCTACATCCACGAGCTGAAGGTCGCGAGGG | DKNSIVQSAAIYIHELKVARDQL |
| | | ACCAGCTGCAGAGGAGGAACGATGAGCTCAAGGCCCAGATCATGGGCCACGACGAGCAGCAGCCGTGC | QRRNDELKAQIMGHDEQQPCVTV |
| | | GTCACGGTGCAGTTCGAGGTCGACGAGCCGTCGTCGTCGATCGACTCCATGATCGCCGCGCTCCGGCG | QFEVDEPSSSIDSMIAALRRLKG |
| | | GCTCAAGGGCATGAGCGTCAAGGCGCGCGGGATCCGGTCGAGCATGTCCGGGAACAGGCTGTGGACGG | MSVKARGIRSSMSGNRLWTEMNV |
| | | AGATGAACGTCGAGACCACGATTGCGGCTTGTGAAGTGGAAAAGGCAGTTGAAGAGGCTCTCAAGGAA | ETTIAACEVEKAVEEALKEVERN |
| | | GTAGAGAGGAACCAGCCTGACAGCGATGCCCCATTTCCTGGAAGCAAAGGCTGGACACAGACATCTCA | QPDSDAPFPGSKGWTQTSHVQNV |
| | | TGTGCAAAATGTGTTTTGA SEQ ID NO: 155 | F* SEQ ID NO: 156 |
| 79 | Xa21_Os03g0743500 | ATGGAAGGGCTGACGAGCGAGCAGATGGTGGCGTTCCAGGAGGCGTTCTTGCTCTTCGACAAGAACGG | MEGLTSEQMVAFQEAFLLFDKNG |
| | | CGATGGATGCATCACCTTGGAAGAGCTGGCTGCGGTGACTCGTTCTCTTGGCCTTGAGCCGACCGATC | DGCITLEELAAVTRSLGLEPTDQ |
| | | AGGAGCTCAACGACATGATGAGGGAAGTTGATACGGATGGCAATGGGATCATAGATTTTCAGGAGTTC | ELNDMMREVDTDGNGIIDFQEFL |
| | | CTGAGTCTCATTGCCAGGAAGATGAAGGATGGGGATGGAGACGAAGAGCTGAAAGAAGCTTTCGAGGT | SLIARKMKDGDGDEELKEAFEVL |
| | | CCTAGACAAGGATCAGAATGGTTTTATCTCCCCAACTGAGCTGAGGACAGTGATGACCAATCTTGGGG | DKDQNGFISPTELRTVMTNLGEK |
| | | AGAAGATGACAGACGAGGAGGTTGAGCAGATGATAAGGGAGGCGGATACCGATGGCGACGGGCAGGTG | MTDEEVEQMIREADTDGDGQVNY |
| | | AACTACGATGAATTTGTGATAATGATGAAAAACGCTGAACGGAAGATATCTGGGTGA | DEFVIMMKNAERKISG* |
| | | SEQ ID NO: 157 | SEQ ID NO: 158 |
| 80 | Xa21_Os03g0748900 | ATGGAGGGCGAGAGGAGGGCGGTGAGGACGGTGCGGGTGCGGAACATCTCAGATCTGGCAGGGGAGCG | MEGERRAVRTVRVRNISDLAGER |
| | | GGAGGTGCGGGAGTTCTTCTCCTTCTCCGGCGAAATCGAGCACGTCGACATCAGATGCGATGGGGTGG | EVREFFSFSGEIEHVDIRCDGVA |
| | | CGACGGGGAGGACGGCCTACGTCACGTTCAAGGATCCCAAGGCCCTAGAGATCGCGCTGCTGCTGTCG | TGRTAYVTFKDPKALEIALLLSG |
| | | GGAGCAACAATTGTGGATCGGGTTGTCAACATAACCCCTGCTGAAGACTACATCTACATCCCTGTTTC | ATIVDRVVNITPAEDYIYIPVSD |
| | | TGACCAGCAACTTGTGGTCAGTGAGGTGGTCGGTGAGGTGACTAGTACGGCTCCTAATGCAGATTTGG | QQLVVSEVVGEVTSTAPNADLDQ |
| | | ACCAACCTACCGAGGCCAATGCCAGCCCCACTACTGGCCGTGTTTATGTCAGCAAGGCTCATGATGTC | PTEANASPTTGRVYVSKAHDVMT |
| | | ATGACAACTGTGATTGCAAGGGGTTCAGCAATGCGACAAGATGCTGTGAACAAAGCTAAAGCATTCGA | TVIARGSAMRQDAVNKAKAFDEK |
| | | TGAGAAACATCAATTGAGGGCAAATGCATCGGCCAAGATCAATTCCTTTGATAAGCGTGTTGGAATTT | HQLRANASAKINSFDKRVGISEK |
| | | CAGAGAAGATAAACAGCGGGATAACAGTTGTAAATGAGAAAGTGAAATCTGTAGACCAAAGGCTACAT | INSGITVVNEKVKSVDQRLHVSD |
| | | GTTTCTGACAAAACAATGGCTGCTTTGCTGGCTGCAGAGCGCAAGCTAAATGACACTGGCTCTGCTGT | KTMAALLAAERKLNDTGSAVKTN |
| | | GAAAACCAACAGGTATGTGTCTGCTGGAACAAGTTGGCTAAATGGTGCCTTCAGCAAGGTTGCTAAGG | RYVSAGTSWLNGAFSKVAKAGHV |
| | | CTGGTCATGTTGCTGGCTCAAGAACAAGAGAGAAGTTCCAAATAGCTGTGTCCAATCTAACAGCGAAA | AGSRTREKFQIAVSNLTAKGPAV |
| | | GGTCCTGCTGTTGTTGCTTGA SEQ ID NO: 159 | VA* SEQ ID NO: 160 |
| 81 | Xa21_SORBIDRAFT_01g006820 | ATGGCGCCGTGGAGCGGCTTATGGGGCGGGAAGTTGGCCGCCGCCGGCGGCGGCGGCGGCGACCACTA | MAPWSGLWGGKLAAAGGGGGDHY |
| | (Os03g0770800) | CCGGGGCACGCCGGTGGTGGTCAAGATGGAGAACCCCAACTGGTCCATCTCCGAGATCTCCTCGCCGG | RGTPVVVKMENPNWSISEISSPD |
| | | ATGACGACGACGACGAGGAGTTCTTGGTCGGCGGCCGCCGCAAGGGGGGGCGCGGCAAGAACGCCAAG | DDDDEEFLVGGRRKGGRGKNAKQ |
| | | CAGATCACCTGGGTGCTGCTGCTCAAGGCGCACCGCGCCGCCGGGTGCCTCGCGTCGCTGGCCTCCGC | ITWVLLLKAHRAAGCLASLASAA |
| | | GGCCGTCGCGCTCGGCGCCGCCGCCAGGCGGAGGGTCGCCGCCGGGAGGACGGACGCCGACGCCTCCG | VALGAAARRRVAAGRTDADASAA |
| | | CCGCCGCCGCCGGCGAGAGCCCCGTGCTCCGCTCCCGCTTCTACGCGTTCATCAGGGCATTCGTCGTC | AAGESPVLRSRFYAFIRAFVVLS |
| | | CTCTCGGTGCTGCTCTTCATTGTCGAGCTCGGCGCCTACATCAATGGCTGGGACGACCTCGCCGCCTC | VLLFIVELGAYINGWDDLAASAL |
| | | CGCGCTCGCCCTCCCCGTCATCGGCGTCGAGTCGCTCTACGCGTCGTGGCTGCGCTTCCGCGCCACCT | ALPVIGVESLYASWLRFRATYVA |
| | | ATGTCGCCCCATTCATCCAGTTCCTGACCGACGCATGCGTCGTGCTCTTCCTCATCCAGAGCGCCGAC | PFIQFLTDACVVLFLIQSADRLI |
| | | CGCCTCATCCAGTGCCTCGGCTGCTTCTATATCCATCTCAAGCGCATCAAGCCTAACCCCAAGTCACC | QCLGCFYIHLKRIKPNPKSPALP |
| | | GGCATTGCCCGACGCCGAAGACCCCGACGCCGCGTACTACCCCATGGTACTCGTGCAGATACCAATGT | DAEDPDAAYYPMVLVQIPMCNEK |
| | | GCAACGAGAAGGAGGTTTATCAGCAATCAATTGCGGCCGTGTGCAATCTTGATTGGCCGAGGTCCAAC | EVYQQSIAAVCNLDWPRSNFLVQ |
| | | TTCTTGGTTCAGGTATTGGATGATTCGGACGATCCGACGACGCAGACGCTGATCAGAGAAGAGGTGCT | VLDDSDDPTTQTLIREEVLKWQQ |
| | | CAAGTGGCAGCAGAACGGCGCTCGGATTGTGTACCGGCATCGTGTCCTTAGGGATGGTTATAAGGCTG | NGARIVYRHRVLRDGYKAGNLKS |
| | | GAAATCTCAAGTCGGCGATGAGCTGCAGCTATGTCAAGGACTATGAGTTTGTTGCCATCTTTGATGCG | AMSCSYVKDYEFVAIFDADFQPN |
| | | GACTTCCAACCAAATCCGGACTTCTTGAAGCGAACCGTGCCACATTTCAAGGACAATGATGAATTGGG | PDFLKRTVPHFKDNDELGLVQAR |
| | | GCTAGTGCAAGCAAGATGGTCATTTGTGAATAAGGATGAGAACCTATTGACTCGTCTGCAAAACATTA | WSFVNKDENLLTRLQNINLCFHF |
| | | ATCTTTGCTTCCACTTTGAGGTAGAACAGCAAGTGAATGGGATATTCCTAAACTTCTTCGGGTTCAAT | EVEQQVNGIFLNFFGFNGTAGVW |
| | | GGCACTGCTGGTGTGTGGAGAATCAAGGCATTGGATGACTCGGGAGGGTGGATGGAGCGTACCACAGT | RIKALDDSGGWMERTTVEDMDIA |
| | | GGAGGACATGGACATTGCAGTCCGGGCACACCTCAGGGGCTGGAAATTTATCTTCCTAAATGATGTCG | VRAHLRGWKFIFLNDVECELPES |
| | | AGTGTGAATTGCCAGAGTCATACGAAGCTTATCGGAAGCAGCAGCATCGGTGGCATTCTGGTCCAATG | YEAYRKQQHRWHSGPMQLFRLCL |
| | | CAGCTATTCAGACTCTGCTTACCAGACATTATCAAATGCAAGATTGCATTTTGGAAGAAAGCCAACTT | PDIIKCKIAFWKKANLIFLFFLL |
| | | GATCTTCCTTTTCTTCCTTCTCCGGAAGCTCATACTACCATTCTACTCTTTCACGCTCTTCTGCATCA | RKLILPFYSFTLFCIILPMTMFV |
| | | TCCTCCCAATGACGATGTTTGTGCCTGAAGCCGAGCTCCCTGACTGGGTCGTATGCTACATTCCTGCC | PEAELPDWVVCYIPALMSLLNIL |
| | | CTGATGTCCTTGCTCAACATCCTGCCTTCTCCGAAGTCTTTCCCTTTCATCATCCCATACCTACTTTT | PSPKSFPFIIPYLLFENTMSVTK |
| | | CGAGAACACCATGTCCGTGACAAAATTCAATGCCATGATCTCTGGTCTGTTCCAGCTTGGAAGTGCAT | FNAMISGLFQLGSAYEWVVTKKS |
| | | ATGAGTGGGTGGTGACCAAGAAGTCAGGCCGATCATCGGAGGGCGACCTCATTTCTTTGGCACCCAAA | GRSSEGDLISLAPKELKHQKTES |
| | | GAGTTGAAACACCAAAAAACTGAATCGGCGCCTAACCTCGACACTATTGCAAAGGAGCAGTCCGCTCC | APNLDTIAKEQSAPRKDVKKKHN |
| | | TAGAAAGGACGTAAAGAAGAAGCACAACCGGATATACAAGAAAGAGCTTGCACTCTCATTGCTCCTCC | RIYKKELALSLLLLTAAARSLLS |
| | | TAACCGCTGCGGCTCGCAGTTTGCTCTCGAAACAGGGTATACATTTCTACTTCCTCCTGTTCCAGGGC | KQGIHFYFLLFQGISFLLVGLDL |
| | | ATATCTTTCTTGTTAGTAGGCCTTGATCTCATAGGCGAGCAGATTGAGTAA | IGEQIE* |
| | | SEQ ID NO: 161 | SEQ ID NO: 162 |
| 82 | Xa21_Os03g0788500 | ATGGGGAACACATGCGTCGGCCCCAGCATCAGCAAGAACGGCTTCTTCCAGTCCGTCTCCACGGTGCT | MGNTCVGPSISKNGFFQSVSTVL |
| | | CTGGAAGGCGCGCCAGGACGGCGACGACGTGCTGCCCGGCGCCAATGGCGGCCCTGACGGCGGCGGCC | WKARQDGDDVLPGANGGPDGGGQ |
| | | AGGGCCGGTTGCCGGCGCCGCCGCCGCCGACTTCCGACGCGCCGCTCGCCGTCCAAAACAAGCCCCCC | GRLPAPPPPTSDAPLAVQNKPPE |
| | | GAGCACGTCAAGATCGTCTCGACCACGGACACCGCCTCCGCCGAGCAGGACGCCTCCAAGTCGAGCGC | HVKIVSTTDTASAEQDASKSSAG |
| | | CGGCTCGGACTCCGGCGAGGCCGCCAGGCCGCGGCCGAGGGTGCCGCCGGTGAAGCGCGTCTCCAGCG | SDSGEAARPRPRVPPVKRVSSAG |
| | | CCGGGCTGCTCGTCGGCTCGGTGCTGAAGCGCAAGACGGAGAGTCTCAAGGACAAGTACAGCCTGGGG | LLVGSVLKRKTESLKDKYSLGRK |
| | | CGGAAGCTCGGGCAGGGGCAGTTCGGGACGACGTACCTGTGCGTGGAGCGCGCCACCGGCAAGGAGTT | LGQGQFGTTYLCVERATGKEFAC |
| | | CGCCTGCAAGTCCATCCTGAAGCGGAAGCTGGTCACCGACGACGACGTCGAGGACGTCCGCCGCGAGA | KSILKRKLVTDDDVEDVRREIQI |
| | | TCCAGATAATGTACCACCTCGCCGGCCACCCCAACGTGATCTCCATCAGGGGCGCCTACGAGGACGCC | MYHLAGHPNVISIRGAYEDAVAV |
| | | GTCGCCGTGCACCTCGTCATGGAGCTCTGCGCCGGCGGCGAGCTGTTCGACCGGATCGTCCAGAAGGG | HLVMELCAGGELFDRIVQKGHYT |
| | | GCACTACACCGAGCGGAAGGCGGCGGAGCTCGCCAGGGTCATCGTCGGCGTCGTCGAGGTGTGCCACT | ERKAAELARVIVGVVEVCHSMGV |
| | | CCATGGGCGTGATGCACCGCGATCTCAAGCCCGAGAACTTCCTCTTCGCCGACCAGACGGAGGAGGCC | MHRDLKPENFLFADQTEEAALKT |
| | | GCTCTCAAGACCATTGACTTTGGTCTCTCCATTTTCTTTCGCCCAGGTCAAGTATTCACTGATGTTGT | IDFGLSIFFRPGQVFTDVVGSPY |
| | | TGGTAGCCCTTACTATGTCGCGCCAGAAGTTCTGAAAAAGAAATATGGTCAAGAGGCAGATGTCTGGA | YVAPEVLKKKYGQEADVWSAGVI |
| | | GCGCTGGTGTGATAATTTACATCTTGTTGTGTGGTGTGCCGCCATTTTGGGCAGAGAACGAGCAGGGT | IYILLCGVPPFWAENEQGIFEEV |
| | | ATATTTGAAGAGGTTTTGCATGGTAGACTTGACTTTCAGTCAGAACCATGGCCTAGCATCTCTGAAGG | LHGRLDFQSEPWPSISEGAKDLV |
| | | TGCCAAAGATCTCGTAAGGAGAATGCTTGTTAGGGACCCGAAGAAGAGATTGACAGCTCATGAAGTTT | RRMLVRDPKKRLTAHEVLRHPWV |
| | | TAAGGCATCCATGGGTCCAGGTTGGTGGTTTGGCTCCTGACAAGCCCCTGGATTCTGCTGTTCTATCT | QVGGLAPDKPLDSAVLSRMKQFS |
| | | CGTATGAAGCAATTCTCAGCTATGAATAAGCTGAAAAAGATGGCTCTTAGGGTCATTGCAGAGAACCT | AMNKLKKMALRVIAENLSEDEIA |
| | | ATCTGAAGACGAAATCGCCGGCCTGAAAGAAATGTTCAAGATGATCGACACAGACAACAGTGGACAGA | GLKEMFKMIDTDNSGQITFEELK |
| | | TCACCTTCGAAGAACTCAAGGTTGGGCTGAAAAAAGTTGGTGCTAACCTCCAAGAATCCGAGATCTAC | VGLKKVGANLQESEIYVLMQAAD |
| | | GTACTCATGCAAGCCGCGGATGTAGATAACAGCGGCACGATAGATTACGGGGAGTTCATCGCTGCAAC | VDNSGTIDYGEFIAATLHMNKIE |
| | | TCTGCATATGAACAAGATCGAGCGGGAGGATCACCTGTTCGCGGCGTTCCAATACTTCGACAAGGACG | REDHLFAAFQYFDKDGSGYITAD |
| | | GCAGCGGCTACATCACGGCCGATGAGCTGCAGCTCGCCTGCGAGGAGTTCGGCTTGGGAGACGTTCAG | ELQLACEEFGLGDVQLEEMIREV |
| | | CTCGAGGAGATGATCAGAGAAGTCGACGAAGACAACGATGGTCGCATAGATTACAACGAGTTCGTGGC | DEDNDGRIDYNEFVAMMQKPTMG |
| | | GATGATGCAGAAGCCGACGATGGGGCTCCCGGCGAAGAAGTCCGGCGGGCTGCAGAACAGTTTCAGCA | LPAKKSGGLQNSFSIGFREALRM |
| | | TCGGCTTCAGGGAGGCCTTGAGGATGTCTTGA SEQ ID NO: 163 | S* SEQ ID NO: 164 |
| 83 | Xa21_Os04g0301500 | ATGGACGCCGAGATGGCCATGGGCGAGAGCTTCGCCTACTACTGGGAGACGCAGCGCTACCTCGAGTC | MDAEMAMGESFAYYWETQRYLES |
| | | CGAGGAGCTCGACAGCATGTACCTGCCGACGCAGGATGACTCCAACTACGAGTCGAGCTCGCCGGACG | EELDSMYLPTQDDSNYESSSPDG |
| | | GGTCGCACTCGTCGTCGGCGACCGCGGCGGCCGTCGGCGGGGACGCCGCCGCCGCGGTGGCTGGTGGT | SHSSSATAAAVGGDAAAAVAGGG |
| | | GGCGGCGGGATGATGATGATGATGGGCGGCGGCAGCAGCGGTGGTGGCGACGACGCCGGTGGCGCGAA | GGMMMMMGGGSSGGGDDAGGANK |
| | | CAAGAACATCCTCATGGAGCGCGACCGCCGCCGCAAGCTCAACGAGAAGCTCTACGCGCTCCGCAGCG | NILMERDRRRKLNEKLYALRSVV |
| | | TCGTGCCCAACATCACCAAGATGGACAAGGCGTCGATCATCAAGGACGCGATCGAGTACATCCAGCGC | PNITKMDKASIIKDAIEYIQRLQ |
| | | CTGCAGGCGGAGGAGCAGCAGATGCTCCGGGAGGTCGCCGCGCTCGAGTCCGCCGCCGCGGCGAGCGC | AEEQQMLREVAALESAAAASAAP |
| | | CGCCCCGGCAGCGGCGAACCCGTTCGCCGGCCTCGGCGCCGACGAGGAACACGAGTACGGCCACCACC | AAANPFAGLGADEEHEYGHHHPS |
| | | ACCCCTCGTCGTCGTCGGAGCGGACGAAGAAGGTGAAGCGGGCGCTGTCCGTGTCGTCCATCAGCGAC | SSSERTKKVKRALSVSSISDALL |
| | | GCCCTGCTCGCCGCGGCGGCGCCGCCGCCGCCGGTGGAGATCCAGGAGCTGCGCGTGTCGGAGGTGGG | AAAAPPPPVEIQELRVSEVGDRV |
| | | CGACAGGGTGCTGGTGGTGAGCGTGACGTGCAGCAAGCGCCGCGACGCCATGGCCCGGGTGTGCCGCG | LVVSVTCSKRRDAMARVCRALEE |
| | | CCCTCGAGGAGCTCCGCCTCCGCGTCATCACCGCCAACATCACCTCCGTCGCCGGCTGCCTCATGCAC | LRLRVITANITSVAGCLMHTLFV |
| | | ACACTCTTCGTCGAGGTAGATCACATGGACAGTGTCCAAATGAAGCAGATGGTGGAGGCTGCTCTCTC | EVDHMDSVQMKQMVEAALSQLVA |
| | | CCAGCTTGTGGCGACCGGCAGTCCGTTGAGCTCCATGAGCTATTAG | TGSPLSSMSY* |
| | | SEQ ID NO: 165 | SEQ ID NO: 166 |
| 84 | Xa21_Os04g0398800 | ATGGCGGAGGCGGGGCCTAGCTGGCCGGCCGCCGCCGCCGGCGACTTCCCGGAGCTCCTCGCCTTCTG | MAEAGPSWPAAAAGDFPELLAFC |
| | | CGCCCGCGCGGAGGCCCTCATCGCCGAGCTCCTCCTCCTCTCCGACCGCGCCCCGCCGCAGTTCGCCG | ARAEALIAELLLLSDRAPPQFAD |
| | | ACCGCCGCTTCCACCCCGTCCTCTTCGACTTCCGATACTTCGACTCCCCGGGCGAATTCGAGGCGAGG | RRFHPVLFDFRYFDSPGEFEARI |
| | | ATCGAGGGCAACATCGAGCTGGAGGCCCTGGAAGACGAGCTCCGCGATTCCTGCGGCTCCTACATGCG | EGNIELEALEDELRDSCGSYMRR |
| | | GAGGTTCTTCGCCTTGCTGGATGCTGCCGTCGCTTACCACGCCGAGCTGTGCAGCTACCTCAACGACC | FFALLDAAVAYHAELCSYLNDLQ |
| | | TGCAGGAAGGGCTGTATGTGCATTGCACATTGGATGGTGTACTGGAGAGCAACTGGGCTTGCCAATTG | EGLYVHCTLDGVLESNWACQLLT |
| | | CTTACAGAGTCGATGACTTTGTTTGGGTGTATGGTTCTGCTAATGGAGCACAGGATTAGCGGATTGCT | ESMTLFGCMVLLMEHRISGLLRE |
| | | GCGCGAGAGACTTCTGGTGGCGTATATGCGGCACGAGCGTTGCTTCAGCTTCCCTAATGTGGAGCGCA | RLLVAYMRHERCFSFPNVERICE |
| | | TATGCGAGCTCTGTCGTCAGCATGCGACTGCACCTCCTTCGCCTGGTGCCTCCGGTTCATCGTTGCAT | LCRQHATAPPSPGASGSSLHSAE |
| | | AGTGCGGAAATCATCTCTGTACAGAAGCCTGAGGACCTGCTGAGGAGGTTTCAGTTTCCCGAGCTCGT | IISVQKPEDLLRRFQFPELVVDA |
| | | TGTCGATGCTGTCATAACTTGCTTGAGAAATGGTGATGTTTACAACAATGTCCGGTTCTACCCTGATC | VITCLRNGDVYNNVRFYPDPQHR |
| | | CGCAGCACCGGACAACCGCTCTCTCATTGCAAGGTGGACAAATGTATGTGTTGTTATTTTATTCTCGT | TTALSLQGGQMYVLLFYSRDLLH |
| | | GACCTTCTACACAACGGTTTGGCTATGCGGGAGATTATTGATCGCTTCTTTAAGGACAACTGGGTGGT | NGLAMREIIDRFFKDNWVVPIFL |
| | | TCCCATCTTCTTGCATTTCTCGGTAGATTTACTTGTCTCATGGGATGCATTCAAAGAAGCGAAATCAT | HFSVDLLVSWDAFKEAKSSLVSC |
| | | CATTAGTTTCTTGCCTTTCTCCCACCTTCATACGTGATCGCAGTCTATACCACTATACAAAGGTATCT | LSPTFIRDRSLYHYTKVSSLLAD |
| | | TCTCTTCTAGCTGACCTGGATAGTCATATGCATGCGGTAAACAAGGAATATGTTCTGGATAATTCTCT | LDSHMHAVNKEYVLDNSLNLLSI |
| | | GAATCTTCTTTCTATCATCAGAGAGTGCAATTGCACACTGCGTTGGCTTTTGCTTCACCGCATGACAA | IRECNCTLRWLLLHRMTNDKKAR |
| | | ATGATAAGAAGGCAAGGGACCTAGTGATCTGTTTAGGGTCATCACAACATGCTGACGAAGGGAAGCTG | DLVICLGSSQHADEGKLLQLLMK |
| | | TTACAGCTCCTAATGAAGACTGCTAAACTTGAGTTTGAGGTGAAGGAACTGCATGCTGAACTATTGAA | TAKLEFEVKELHAELLKTRKSMW |
| | | AACCAGAAAAAGTATGTGGTATGAGAAGAGGCATGATGCTTTGGAATGTATGAAGGACCTGTCTCAGA | YEKRHDALECMKDLSQNYLGIWA |
| | | ACTATCTTGGGATTTGGGCTGCTTCATGCAAATTAAAAAACAAGAGCATCAAAGACTGGTTGGAGCAC | ASCKLKNKSIKDWLEHLSSEVSS |
| | | CTGTCATCAGAGGTTAGCTCCCTGGATTATGCCACAATTGGAAACTCCGGCAGGATAATTCATCGTGT | LDYATIGNSGRIIHRVLSTLKDI |
| | | GCTATCTACGCTAAAAGATATTGAGCTACTTCACCAAATCAAAGAGAATATACAGATAAAGCATGGCT | ELLHQIKENIQIKHGFSKIQKNL |
| | | TCTCCAAAATACAGAAGAATCTTCATGATATGATAAAAGTTCTAAACCTAAACCAAGAGTCCATAAGT | HDMIKVLNLNQESISVFSVITDG |
| | | GTTTTCTCAGTGATTACTGATGGTAAGTATGCATGGGGTTATCTTACTTATTTTGAGGAACTTCTTAA | KYAWGYLTYFEELLKKKISQDPS |
| | | GAAGAAGATCAGTCAAGATCCATCAGAGTCTTTATTTTTGCATACGATGTTTCTTAAATTTCAATCAT | ESLFLHTMFLKFQSWLDAPLQRI |
| | | GGTTGGATGCACCGCTGCAGAGGATCAAGCAGTACGAAAGTCCAGATCTTCAATATGTCTCAACCTAC | KQYESPDLQYVSTYYVSKYAAKI |
| | | TATGTTTCAAAGTATGCAGCTAAAATATTTGCAGTTCTAGATATTATCCCGGCTATATTGCTTAAAAT | FAVLDIIPAILLKISIAVDYINA |
| | | TTCTATTGCTGTGGATTACATCAATGCTGAACAGTCCACTCATCTAATAAATCGCATCAACAAGGAAA | EQSTHLINRINKETLEDLMQLDQ |
| | | CATTGGAAGATCTCATGCAGTTGGATCAACAACTATGTCAAGCACAGCAAGCTTCCAAACTATGCATT | QLCQAQQASKLCIVSEGLLNMSK |
| | | GTTTCAGAGGGCCTTTTGAACATGTCAAAGAACTTTGATGGCCTTATAGATCTGAATTTAGGTGGATG | NFDGLIDLNLGGWLKQMIKKELV |
| | | GCTTAAGCAAATGATAAAAAAGGAGTTAGTAAGCCAACTACAAGGCAAGCTGAAAGCCTTATCATTGC | SQLQGKLKALSLLIYGDIEGNLM |
| | | TCATTTATGGTGATATAGAAGGCAATCTCATGTCATTGTCAAATTATATGCTTTCACAGATGCAGAGA | SLSNYMLSQMQRMEFLQHILHIE |
| | | ATGGAATTCCTACAGCACATACTGCACATTGAGGGGTGTTCAATCTGGGAAGAAACATTGACTGCTGT | GCSIWEETLTAVLEECAKREVLE |
| | | GCTAGAAGAATGTGCTAAAAGGGAGGTCTTAGAGTTTATGGGATGCATGCAACCATCCACTAATATGG | FMGCMQPSTNMVKPSNHMSNPGT |
| | | TGAAACCATCGAATCATATGTCCAATCCGGGCACTTTTTTTGGTAATATTTTAGATTAA | FFGNILD* |
| | | SEQ ID NO: 167 | SEQ ID NO: 168 |
| 85 | Xa21_Os04g0459600 | ATGGCGGCGCGGCGGAGGCACGCGGCTGTGGTGGTTGCAGGGGTGGCGGCTGCGGGGGAGTGGGTGGT | MAARRRHAAVVVAGVAAAGEWVV |
| | | GGTGACCGCCTGGGCAGGGAACCGGCTTGGGCGTTGTCGCCGGCGGAGGTGGAGGTGGAGGAGGTGGG | VTAWAGNRLGRCRRRRWRWRRWG |
| | | GACGAACCAGGAGCTGCTGCGGCGGACGGGGCTCCCGCCACGGGACCGCGCCATCGTCGTCAACCTGG | RTRSCCGGRGSRHGTAPSSSTWT |
| | | ACCGTCGCGCCGCTTGTCCGGGAGCTCCGCTCCCGCCTCTCCGCCTCTCCAACCCCCGCACAGTCGCC | VAPLVRELRSRLSASPTPAQSPS |
| | | GTCGCCGCCGCAGAAGAATATAAAGGATGCTGTCACCCAACGGTGCTGGAATGCTGAGGACTCAGGAC | PPQKNIKDAVTQRCWNAEDSGLS |
| | | TGAGTGAGGTGTTCGTTGACCCGGCTCGCGACAAGAGCCTCATCTTCGACCTGCTCGACCTCAAGGGC | EVFVDPARDKSLIFDLLDLKGEV |
| | | GAGGTGGAGGACGGCAACAGTGCACTTTGGTTCCTGCGCGACATCGCCAATGAGCAGGATGCGGGGGA | EDGNSALWFLRDIANEQDAGDNL |
| | | CAACTTGGTGGTTGAGCATTCTGGGATGATTGAGCTAAGTGGTCTGCGATTTGGAGATGCTCCTGCAG | VVEHSGMIELSGLRFGDAPAVAG |
| | | TGGCTGGAACTGCGGTTGGTCAGCTGGCTATCTCAAAAGGAAGGCAAGGCAGAGAAGCACAGAACATT | TAVGQLAISKGRQGREAQNIVRL |
| | | GTTCGACTTTACTTGGCCAATATACGCCTCAAGAATGCAGCTACTGATGTAGTTATTACTGCATATGA | YLANIRLKNAATDVVITAYEPLL |
| | | GCCACTGTTGATAAACCCCTTGAGTGAAAGCGCCAGTGCAGTTGCAGCCGGTCCAGCAGTACCAGCAG | INPLSESASAVAAGPAVPAEQAG |
| | | AACAAGCAGGATGCTTAGCAATGTCTGAGATCTTCAAGCTCGCCGTGATGAACTTCAATGTCCATGAC | CLAMSEIFKLAVMNFNVHDWNLF |
| | | TGGAATCTTTTCAATGGCAGCAGTTGA SEQ ID NO: 169 | NGSS* SEQ ID NO: 170 |
| 86 | Xa21_Os04g0464966 | ATGCGACGCGAGCGCGACGCGACGCAAATCCCGGAGAACCCTATGGAGATGGAGGGGATCCCCCAGAC | MRRERDATQIPENPMEMEGIPQT |
| | | CGCCGCGGCGGCGGCGGCGGAGGCATCTGAGCCACCGCGCAAGCGCGCCCGCGTCGACGACGACGGCG | AAAAAAEASEPPRKRARVDDDGG |
| | | GCGGCGGCGCGGGGGAGGAGGAGGAGGACCGGCTGAGCGAACTGCCGGACTGCCTCCTGGAGGACATC | GGAGEEEEDRLSELPDCLLEDIL |
| | | CTGGCGCATCTCGGGTCCCGCCAGGCCGTGCAGACGAGCGTGCTGTCGCGGCGGTGGCGGAACCTCTG | AHLGSRQAVQTSVLSRRWRNLWR |
| | | GCGCGGCGTGCGGGTCGTGGACATCGACGTGGGGTCGTTCCGCCTCCCGGGCGCCGACGGCGACCCGC | GVRVVDIDVGSFRLPGADGDPPR |
| | | CGCGGTTCCGCCTGGATCGCATCGAGGACTTCGCGGACGGCGTCCTGTCGCCGTCGCTCCACCCGGGC | FRLDRIEDFADGVLSPSLHPGAA |
| | | GCCGCGCGGGAGCTGGACGCGCTCCGGATGCGCCTGGACGAGGACGCGGTGACCACCAACTTCCAGAG | RELDALRMRLDEDAVTTNFQRWI |
| | | GTGGATCCGCCGCGCCCTCTGGCGCCGCCCCGCCACCGTCGACCTCTACTACCTCCCCCGCCGCTCCT | RRALWRRPATVDLYYLPRRSFSW |
| | | TCAGCTGGCCGCCCGCCGTGCCCCTGACCCCGGTCGCCGCCGTCAGCCGCCTCAAGACCCTGCGCATC | PPAVPLTPVAAVSRLKTLRIFGL |
| | | TTCGGGCTCCGCCCGACGGTCGTCTTCGGCGCCGACGAGTTCCCGGCCCTCGAGGACCTGCACATCGA | RPTVVFGADEFPALEDLHIERCS |
| | | GAGGTGCTCGTACGCGCACGGCACCATCGCCTCGCCCACTCTCAAGCGGCTCGCCCTCGTCTCCCCAA | YAHGTIASPTLKRLALVSPINGC |
| | | TCAACGGCTGCTTCGTCCGCGAGCAGCGCCTCACGGCTCCAGGCCTCACCTCGCTGCGCCTCGTCCTC | FVREQRLTAPGLTSLRLVLPYSR |
| | | CCGTACAGCCGGGAGGAAGGGGTTAGGGTGATCACCGACGCGCCGCTCACATCGCTCGTCGACGCGTC | EEGVRVITDAPLTSLVDASITIV |
| | | GATCACCATAGTCGACACCGATCCTGGGGATCCGCGGAACCGACGGGTGAACCAATTCAAGGTTGACT | DTDPGDPRNRRVNQFKVDFLVAI |
| | | TCTTGGTTGCCATCAGCAACCTGCTTGGCCGCCTCACCAGCGTCAGAAATCTCGACCTGACTGGGCTC | SNLLGRLTSVRNLDLTGLNATAL |
| | | AATGCAACGGCACTGCTGGATAATAAATCCCAGGAATTCCCGATGTTCCCCTACTTGACAACATTGCT | LDNKSQEFPMFPYLTTLLLNECD |
| | | CCTCAACGAGTGTGACATTGGATACAAGTACCACGTGTTGAGGAGCATCCTTCAGAACGCCCCAAATC | IGYKYHVLRSILQNAPNLEQLRL |
| | | TGGAGCAGCTTAGACTACACAATTGCAAGTTTGTAGGTAAATCGAGGAGGAAGGCTGGGCAAACCCAG | HNCKFVGKSRRKAGQTQSKEKTS |
| | | TCGAAGGAGAAAACTTCAAAATGCTCTAGCTCAACATTGTCTTCCGCGTGCAGCAGTTTGAAGTCAGT | KCSSSTLSSACSSLKSVEIKHPH |
| | | GGAAATCAAGCACCCGCACGGTGAACCTTCTCATGATCTTTTACATGAATTTCTGAAGGAAATACCAC | GEPSHDLLHEFLKEIPHNQWRKR |
| | | ACAATCAATGGAGGAAGAGATCGATTGATGAGGAGACAATATCAATCGAGCTCAATAGAAAGTAG | SIDEETISIELNRK* |
| | | SEQ ID NO: 171 | SEQ ID NO: 172 |
| 87 | Xa21_Os04g0491100 | ATGCTTGTCCATAGAAGCATTGAGAAAGATGTATTTGAGCCACTTGTGATGCGTATTTCTGAAATTGC | MLVHRSIEKDVFEPLVMRISEIA |
| | | GCAACACTATTTTGGGACAGTGGGCTCATCTGAAACTGGTGAGAAGGGTCCTACAGTGCCTGAATTTC | QHYFGTVGSSETGEKGPTVPEFP |
| | | CAGAGAAGATCAAATGGGAAGTGCAACATCTCGAAGAATTGTTTGAGGGCATTAAAGAAGACAAGGAG | EKIKWEVQHLEELFEGIKEDKEE |
| | | GAGGTCTATGAGGGTTTTAAGTCTGTTAGCCTTGCAATCTCCGAGTGGCAGAGAAGATTGGCTATAGC | VYEGFKSVSLAISEWQRRLAIAY |
| | | ATACCAAAATGCAGCTAGAGATCCTCAACCTTTTGAGGGAATGAAATGGGCAATGGAGTATCATGAGA | QNAARDPQPFEGMKWAMEYHEMW |
| | | TGTGGGTTGAAGACAATAATATAATAGGAGCTGGTGATGAGATATTGGATTTTGATGAACATGAGCTT | VEDNNIIGAGDEILDFDEHELFE |
| | | TTTGAATCACTTAGATATGTCAAGACTGCACAAGGTGGTTCAGAAGCTCATCTCCTGGAAAGTATCAA | SLRYVKTAQGGSEAHLLESIKSG |
| | | GAGTGGGATGCAGTGCATAAAGAATGTGTTAGCCACCATTCGATCAAGAAAGGAAGCAGACAACAGGA | MQCIKNVLATIRSRKEADNRSWC |
| | | GCTGGTGCATTGTGGAACAGGTCTTCTCCCCGCTACTGAAACTTTTGAAAACTATCAATCATCTAGTA | IVEQVFSPLLKLLKTINHLVSEA |
| | | TCAGAAGCGGCTGCCCGCAACAACAAGTCTGAGAACTATAAGATCCTTGTCAAGATCGATGCTGAAGT | AARNNKSENYKILVKIDAEVNCL |
| | | CAACTGCTTACAGGATGCACTAGATTTGATTGATAGAAATAAGAATGAGGTTTATGAGAACTTCAGAT | QDALDLIDRNKNEVYENFRLIED |
| | | TAATAGAAGATCTCATACTACCATTATTAACATGCCTTAAGGCCACATACAATGATCAATCAGAATCT | LILPLLTCLKATYNDQSESLSFL |
| | | TTGAGCTTCCTAGATGCAGTCAAACACGGAGTGAATTACTTGGAAGGTGTACTTGACAAGATTGAGCA | DAVKHGVNYLEGVLDKIEQKQRD |
| | | GAAGCAGCGGGATGGAAATGATAATTTCCACATTGTCAAAGCAGCCTTCTCACCATTGTTGACATGCA | GNDNFHIVKAAFSPLLTCMYTFR |
| | | TGTACACCTTCAGGCGCATCTCGTTGGAAACCTTAGCCCATGAAGATAAATCAGATGCTTTTATTCTG | RISLETLAHEDKSDAFILLDRIR |
| | | TTGGACAGGATCAGAGATGATTTGTCACAGCTCAAAGATGTACTTCAGATGGTTCAAGAGAAAGAGAA | DDLSQLKDVLQMVQEKENGIYSN |
| | | CGGAATATACAGTAACTTTGATGCAATTGAAGAACATATTGATGAGATTTATGACGGACATATGAATG | FDAIEEHIDEIYDGHMNVEGSLK |
| | | TTGAAGGTTCCTTAAAACTTAACCAGATGGGTGGTCTGCGAGACAAGCTCCAGTTGATTCATGAAGAG | LNQMGGLRDKLQLIHEEITNIRG |
| | | ATAACAAATATACGGGGAAAGGTGGATGACTCTTTCAAGGTCCAGGAGGTCTCATGCCATGTCATGCG | KVDDSFKVQEVSCHVMRMAAAHE |
| | | CATGGCTGCAGCACATGAAGCTTCATCTTCTCATCAGTTGTCAGCATCAAATACCTTCTGCATTACCA | ASSSHQLSASNTFCITMESAQMW |
| | | TGGAAAGTGCGCAGATGTGGCAGCTCAAAGTTATAATTGATGAACTAGAGACAAGATTGAGACACTGC | QLKVIIDELETRLRHCLLCLAVF |
| | | CTTCTATGCCTTGCTGTGTTCCCAGTGGATGCCATCATCAAGAAGAGACTGTTAATTCACTGGTGGAT | PVDAIIKKRLLIHWWIGEGFVTS |
| | | TGGAGAAGGTTTTGTAACTTCGGTTTCTGAAGGCAAGAGCTTCTTTAATAAATTGCTGCTGTCCAATG | VSEGKSFFNKLLLSNGFITPVKK |
| | | GGTTCATTACGCCAGTAAAGAAATACCACTGTGACAAAGTCCACTCGTGCAAGGTGCAACCTTGGATC | YHCDKVHSCKVQPWIRGLLIEAA |
| | | CGTGGACTACTGATTGAAGCTGCAAAGAGCAAAGCATTTGTTGAGCTCAGTTCAGATGGCAGCCCCAG | KSKAFVELSSDGSPRNDFTRTRR |
| | | GAATGACTTCACCAGGACCCGCCGTGCATGCTTGCATGCTGGAAAGATCCTTACAAACTTCCATCCTG | ACLHAGKILTNFHPDVLTIYNIK |
| | | ATGTTTTGACGATTTACAATATCAAGCAACAGTATGTAGAGTTAAACAAGACATGGTTTTCTGAAAAG | QQYVELNKTWFSEKNRLTTLQLG |
| | | AACCGTTTGACCACTTTGCAGTTAGGACAATGGCAGGATGCAAGTTATGACCCTCGGGCACATCACGT | QWQDASYDPRAHHVEINNAKFLK |
| | | TGAGATTAACAATGCCAAGTTCCTAAAGCAGGTCAAATCCTGCAAGCAGTTGAAGTACCTGAGTTTGA | QVKSCKQLKYLSLRGISRIEALP |
| | | GAGGCATATCAAGAATTGAGGCCCTTCCGAACTCAATTGGAAAGCTCTCAAGACTTGTCATTCTTGAT | NSIGKLSRLVILDLKACHNLEDL |
| | | CTCAAAGCGTGCCATAATCTAGAGGATCTTCCTAAAGAAATAGTAAAACTAGTGAAGCTGGAGTACTT | PKEIVKLVKLEYLDVSDCYLLSG |
| | | GGACGTTTCTGATTGTTACCTGCTCTCAGGTATGCCTAAAGGACTAGGCAAGCTTTTTCAACTTGAAG | MPKGLGKLFQLEVLKGFVLSNAK |
| | | TTCTGAAGGGATTTGTTCTATCAAACGCCAAGAGCAAAGATCCATGCCATCTCAATGAACTTGTCATG | SKDPCHLNELVMLKKLRKLSIRI |
| | | CTAAAAAAGTTACGAAAGCTGAGCATTAGAATTGGTTATAGCATAGATAGCGGTCAGTTTGCGAATTT | GYSIDSGQFANFGELCALRSLTL |
| | | TGGTGAGCTCTGTGCTCTCCGGTCGCTTACACTTATTTGGGGGGCACACCCAATATCTACACACGGGA | IWGAHPISTHGSSPSHAAPHAMP |
| | | GTTCTCCAAGTCATGCTGCTCCTCATGCAATGCCTTGTGTTCTCCCCTTAGGTCTTGAGAAGCTGGAG | CVLPLGLEKLELRCFPLVELPHW |
| | | CTCCGTTGTTTTCCCCTTGTAGAATTGCCTCACTGGGTTAGTCCTGAAAAGCTGAGAAAATTGAAGAA | VSPEKLRKLKKLYISGGNISDLG |
| | | GCTCTACATCAGCGGAGGTAACATCAGTGACCTGGGTGATTTGAAGTCCTGGGAGGTGACTGTACTTC | DLKSWEVTVLRLRFLKHMNYSWT |
| | | GGCTAAGGTTCCTCAAACATATGAACTATTCATGGACTGCCCTGCATGATTCATTCAGGAAACTCGAT | ALHDSFRKLDVLEAHECENLQPW |
| | | GTTTTGGAGGCACATGAATGTGAAAATCTACAGCCCTGGCCTTCCTGCGGAAAAGGGTTATGGCGGAA | PSCGKGLWRKEPNGTIAPVLT* |
| | | AGAACCGAATGGAACGATTGCACCTGTGTTGACCTGA SEQ ID NO: 173 | SEQ ID NO: 174 |
| 88 | Xa21_Os04g0509600 | ATGGCGACGTGCGCGGCGGACCTGGCGCCGCTGCTGGGGCCGGTGGCGGCGAACGCGACGGACTACCT | MATCAADLAPLLGPVAANATDYL |
| | | GTGCAACCGGTTCGCCGACACGACGTCGGCGGTGGACGCGACGTACCTGCTCTTCTCGGCGTACCTCG | CNRFADTTSAVDATYLLFSAYLV |
| | | TGTTCGCCATGCAGCTCGGGTTCGCGATGCTCTGCGCCGGGTCGGTGCGGGCCAAGAACACGATGAAC | FAMQLGFAMLCAGSVRAKNTMNI |
| | | ATCATGCTCACCAACGTGCTCGACGCCGCGGCCGGGGCGCTCTTCTACTACCTCTTCGGCTTCGCCTT | MLTNVLDAAAGALFYYLFGFAFA |
| | | CGCCTTCGGCACGCCGTCCAACGGCTTCATCGGGAAGCAGTTCTTCGGCCTCAAGCACATGCCGCAGA | FGTPSNGFIGKQFFGLKHMPQTG |
| | | CCGGGTTCGACTACGACTTCTTCCTCTTCCAGTGGGCCTTCGCCATCGCCGCCGCCGGGATCACGTCG | FDYDFFLFQWAFAIAAAGITSGS |
| | | GGCTCCATCGCCGAGAGGACGCAGTTCGTCGCCTACCTCATCTACTCCGCCTTCCTCACCGGGTTCGT | IAERTQFVAYLIYSAFLTGFVYP |
| | | CTACCCGGTGGTGTCCCACTGGATCTGGTCCGCCGATGGGTGGGCCTCTGCCTCCCGCACGTCCGGAC | VVSHWIWSADGWASASRTSGPLL |
| | | CTCTGCTGTTCGGCTCCGGTGTCATCGACTTCGCCGGCTCCGGCGTCGTCCACATGGTCGGCGGTGTC | FGSGVIDFAGSGVVHMVGGVAGL |
| | | GCCGGGCTCTGGGGCGCTCTCATCGAGGGACCCCGCATCGGGAGGTTCGACCACGCCGGCCGATCGGT | WGALIEGPRIGRFDHAGRSVALK |
| | | GGCGCTCAAGGGCCACAGCGCGTCGCTCGTCGTGCTCGGCACCTTCCTGCTGTGGTTCGGCTGGTACG | GHSASLVVLGTFLLWFGWYGFNP |
| | | GATTCAACCCCGGGTCGTTCACCACCATCCTCAAGACGTACGGCCCCGCCGGCGGCATCAACGGGCAG | GSFTTILKTYGPAGGINGQWSGV |
| | | TGGTCCGGCGTTGGCCGCACCGCCGTGACGACGACCCTGGCCGGCAGCGTGGCGGCGCTCACCACGCT | GRTAVTTTLAGSVAALTTLFGKR |
| | | GTTCGGGAAGCGGCTCCAGACGGGGCACTGGAACGTGGTCGACGTCTGCAACGGCCTCCTCGGCGGGT | LQTGHWNVVDVCNGLLGGFAAIT |
| | | TCGCCGCCATCACCGCCGGGTGCAGCGTCGTCGACCCGTGGGCCGCGATCATCTGCGGGTTCGTCTCG | AGCSVVDPWAAIICGFVSAWVLI |
| | | GCGTGGGTGCTCATCGGCCTCAACGCGCTCGCCGCGCGCCTCAAGTTCGACGACCCGCTCGAGGCCGC | GLNALAARLKFDDPLEAAQLHGG |
| | | CCAGCTCCACGGCGGGTGCGGCGCGTGGGGGATCCTCTTCACCGCGCTCTTCGCGAGGCAGAAGTACG | CGAWGILFTALFARQKYVEEIYG |
| | | TCGAGGAGATCTACGGCGCCGGCCGGCCGTACGGCCTGTTCATGGGCGGCGGCGGCAAGCTGCTCGCC | AGRPYGLFMGGGGKLLAAHVIQI |
| | | GCTCACGTCATCCAGATCCTGGTCATCTTCGGGTGGGTCAGCTGCACCATGGGGCCTCTCTTCTACGG | LVIFGWVSCTMGPLFYGLKKLGL |
| | | GCTCAAGAAGCTCGGCCTGCTCCGCATCTCCGCCGAGGACGAGACGTCCGGGATGGACCTGACACGGC | LRISAEDETSGMDLTRHGGFAYV |
| | | ACGGCGGGTTCGCGTACGTCTACCACGACGAGGACGAGCACGACAAGTCTGGGGTTGGTGGGTTCATG | YHDEDEHDKSGVGGFMLRSAQTR |
| | | CTCCGGTCCGCGCAGACCCGCGTCGAGCCGGCGGCGGCGGCTGCCTCCAACAGCAACAACCAAGTGTA | VEPAAAAASNSNNQV* |
| | | A SEQ ID NO: 175 | SEQ ID NO: 176 |
| 89 | Xa21_OsI_16631 | ATGGCCGACGCCATCTCATGCCTGCAGCCGTTGTGCGAGTGCTTGGATGGCACCGGCCTGTTCGATGC | MADAISCLQPLCECLDGTGLFDA |
| | | TGCAGCTAGGGATGTCGCCTCTTTCCTTCGGCTCAAATCGAATTGGGGTGATCTTGACAAGGCCAGGG | AARDVASFLRLKSNWGDLDKARE |
| | | AGAGCCTGGGGGCTGTTGAGAGGATGGTTCGAGGGCGGGTAACTGCGGAGTTAAACAAGCTGAACGTC | SLGAVERMVRGRVTAELNKLNVC |
| | | TGTGATCCTCAGGTGGAGCTGTGGCTGAGGCGTGTCGATGAGCTGAAGCTGGGTGCCATTGATGAGGA | DPQVELWLRRVDELKLGAIDEDY |
| | | CTATAGCAGTTTGATGAATTACTCTAGCATTTGCCAGTGCACCAGGCATGCTGCTCGGCGTTCATGGA | SSLMNYSSICQCTRHAARRSWIG |
| | | TTGGCAAGCGTATCGTTGAGGCGCTGGATGAGGTGAATAAACTGATCGAGGAAGGGAGGCAGTTTAAG | KRIVEALDEVNKLIEEGRQFKKF |
| | | AAGTTTGGATTCAAGCCCTCACCGGAGATTGTCGAGCGCTTGCCTCAAACCAAGACATTTGGATTGGA | GFKPSPEIVERLPQTKTFGLETM |
| | | GACCATGCTGGTTCAGCTGCATGATCTGCTTGAGAAGGCTGACTCAAACATAATTGGTATTTGGGGTC | LVQLHDLLEKADSNIIGIWGQGG |
| | | AAGGGGGTATTGGTAAAACGACACTACTACATGCCTTCAACAATGATCTTGAGAAGAAGGTCCATAAC | IGKTTLLHAFNNDLEKKVHNYQV |
| | | TACCAGGTTGTTATATTTATTGAAGTATCCAATTCAGAGACACTTGACACATTGGAGATGCAGAAGAC | VIFIEVSNSETLDTLEMQKTISE |
| | | CATCTCCGAACGTCTTAATTTACCATGGAATGAAGCAGAGACGACTGTGAAACGGGCCAGATTCCTTG | RLNLPWNEAETTVKRARFLVKAL |
| | | TTAAGGCCTTGTCCAGGAAAAGATTTGTACTGCTTCTTGATGATGTAAGGAAGAAATTCCGACTAGAG | SRKRFVLLLDDVRKKFRLEDVGI |
| | | GATGTTGGTATCCCAACTCCAGACACCAACAGCCAAAGCAAGCTGATCCTAACTTCACGTTTCCAAGA | PTPDTNSQSKLILTSRFQELSTE |
| | | ACTAAGCACCGAGGCTTGTGCAGCAGTTGAATCACCTAGTCCCAGCAATGTTGTTAGGGATCATGCCA | ACAAVESPSPSNVVRDHAIAIAQ |
| | | TAGCAATAGCTCAAAGTTGTGGAGGTCTACCACTTGCGCTCAATGTCATTGGGACTGCTGTGGCAGGC | SCGGLPLALNVIGTAVAGYEEPR |
| | | TATGAAGAACCAAGAGATTGGAATTCAGCTGCTGATGCAATCAAAGAGAATATGAAGTTTGAAGGTGT | DWNSAADAIKENMKFEGVDEMFA |
| | | TGATGAAATGTTTGCTACGCTGAAATACAGCTTCGACAGGCTCACACCTACTCAGCAACAGTGCTTTC | TLKYSFDRLTPTQQQCFLYCTLF |
| | | TGTATTGCACTCTTTTTCCAGAGTATGGATCAATTAGTAAAGAGCAACTTGTTGATTATTGGTTGGCT | PEYGSISKEQLVDYWLAEGLLLD |
| | | GAAGGTTTGCTACTTGATGATCGCGAGAAGGGTAATCAGATAATCCGAAGTCTTATTTCAGCATGCTT | DREKGNQIIRSLISACLLQTTSS |
| | | GTTGCAGACCACTAGTTCAATGTCATCAAAGGTGAAAATGCACCACATAATCAGACATTTGGGGCTTT | MSSKVKMHHIIRHLGLWLVNRED |
| | | GGTTGGTTAACAGGGAAGATAGAAGTTTTGTTGTTAAAGCAGGGATGGCCTTAGATAATGCTCCACCA | RSFVVKAGMALDNAPPAIEWKEA |
| | | GCAATAGAATGGAAAGAAGCTACAAGGATCTCCATTATGTCTAATAACATCACAGAGCTTTCTTTCTC | TRISIMSNNITELSFSPKCENLT |
| | | ACCAAAATGCGAAAACCTCACCACACTGTTAATCCAGAATAACCCAAAGTTGAACAAGCTAGGCTGGG | TLLIQNNPKLNKLGWGFFKYMRS |
| | | GTTTTTTCAAATATATGCGATCCTTGAAAGTGCTAGATCTATCACACACTGCAATTACTTCCATTCCA | LKVLDLSHTAITSIPECDTLVAL |
| | | GAATGTGATACATTAGTTGCATTGCAGCATCTCGACCTGTCATACACACATATTATGAGATTACCTGA | QHLDLSYTHIMRLPERLWLLKEL |
| | | GCGCCTATGGTTATTGAAAGAGTTGAGGCATCTGGACCTCAGTGTGACTGTTGCACTTGAAGATACTT | RHLDLSVTVALEDTLNNCSKLHK |
| | | TGAACAACTGCTCAAAGTTACACAAGTTGAGAGTGCTGAATCTTTTCCGCAGCCATTACGGGATTCGT | LRVLNLFRSHYGIRDVDDLNLDS |
| | | GATGTTGATGACCTGAATCTGGATTCACTGAGGTATCTATTGTTTCTTGGTATCACTATTTATTCACA | LRYLLFLGITIYSQDVLKKLNET |
| | | AGACGTGCTTAAGAAATTGAACGAGACCCATCCTTTGGCAAAATCAACGCATCGCTTGAACCTGAAGT | HPLAKSTHRLNLKYCGDMQSIKI |
| | | ATTGTGGAGATATGCAATCAATCAAAATTTCTGACTTTAACCATATGAAGCACCTTGAGGAGATGCAT | SDFNHMKHLEEMHVESCYDLNTL |
| | | GTCGAATCATGCTATGACCTGAATACACTGGTTGCCGATACTGAGTTGACGACTTCTTGCCTACAAGC | VADTELTTSCLQALTLSVLPSLE |
| | | ACTGACCCTCTCCGTCCTTCCCTCATTAGAAAATGTCCTTGTTGCACCAATGCCCCATAATTTTCGGT | NVLVAPMPHNFRYVRKLSISQCP |
| | | ACGTTCGCAAATTGTCCATTTCACAATGCCCCAAGTTGTTGAACATCACATGGGTCCGAAGACTTGAA | KLLNITWVRRLELLERLVISNCD |
| | | CTGCTTGAGAGGCTTGTCATATCCAATTGTGATGAGATGCTGACTATTGTTGAAGAAGCTAACAGTAC | EMLTIVEEANSTEEQQYGAQTIK |
| | | TGAAGAGCAGCAATATGGAGCACAAACAATAAAAATGCAGGGTTATTATTCTGAAGAACAAGACGATC | MQGYYSEEQDDHAMAESSRNEWN |
| | | ATGCAATGGCTGAGAGTTCACGCAATGAGTGGAATGATGATTACCAAAGCGTCAATAGAGAATCAACC | DDYQSVNRESTNGATRQPDFPKL |
| | | AATGGCGCAACGAGGCAACCTGACTTCCCAAAGTTGAGATCAATTGTGCTGACTGATGTGAAGAAGCT | RSIVLTDVKKLRSICTPRVFPCL |
| | | GAGAAGCATTTGCACGCCAAGAGTTTTTCCCTGCCTTGAGACTCTTCGAGTGGAAGACTGCCCAAATT | ETLRVEDCPNLRRIPLCSTHNCG |
| | | TGAGACGCATCCCACTGTGCAGCACTCACAACTGTGGTAAACTGAAGCAAATTTGTGGTTCATCTGAT | KLKQICGSSDWWKKLQWEDKEAA |
| | | TGGTGGAAGAAACTGCAGTGGGAGGACAAGGAGGCGGCGGCACATATGGAGAGCAAGTACTTCATTCC | AHMESKYFIPI* |
| | | AATCTGA SEQ ID NO: 177 | SEQ ID NO: 178 |
| 90 | Xa21_Os04g0521700 | ATGGAGCTCGACCTCCCGCCGAAGCAACGAGGCCCGCCGCTCGCCGACCTCGCCGTTGCCATCCACCG | MELDLPPKQRGPPLADLAVAIHR |
| | | GGCCGCCGAGGCCACCGCCGCGCTCTCCGCACCCTCCTCCTCTTCCCAAGCCACCGCTGCTGTGGCCG | AAEATAALSAPSSSSQATAAVAA |
| | | CCCTCCGTGACGCCCATTCCGCTATAGGCGGCTTCCTCTCTCGCCTCGAGGCCTCCGTCCCTGCCCCT | LRDAHSAIGGFLSRLEASVPAPS |
| | | TCTTCGTCCAGCGACGATCAGCCGATGGCGGACGGCTGCGAGGAGGAGGGGGAGGGGGAGCAGCAGAT | SSSDDQPMADGCEEEGEGEQQMV |
| | | GGTAGAGGAGGTGGAGGAGGGTCTCCGGGAGTGCGCCCTGCAGGGTAGCAAGCGGCGGAAGCGGCCTG | EEVEEGLRECALQGSKRRKRPVP |
| | | TGCCGCCGTCGTGGCCCCTAGGGCGCCGCTCGAGTGGCGGTTGCGTGGTGCCGGAGGCCGCGCCGGCT | PSWPLGRRSSGGCVVPEAAPAPL |
| | | CCTCTGGACGTGGAGGGGCGGCGGCGCGCTGCCATGGATCTCTTGCTACAGTTCCATGGGTAG | DVEGRRRAAMDLLLQFHG* |
| | | SEQ ID NO: 179 | SEQ ID NO: 180 |
| 91 | Xa21_Os04g0556400 | ATGGAGCCGGTGGCCGTCGTGGCGGTGCCGTTCCCGGCGCAGGGCCACCTCAACCAGCTCCTGCACCT | MEPVAVVAVPFPAQGHLNQLLHL |
| | | GTCGCTGCAGCTCGCCTCGCGCGGCGGGGTGGACGTGCACTACGCGGCGCCCGCGGCGCACGTCCGCC | SLQLASRGGVDVHYAAPAAHVRQ |
| | | AGGCCCGCGCGCGGGTGCAGGGCTGGGACGACGCGGCGCTCCGCTCCGTCCGGTTCCACGACCTCGGC | ARARVQGWDDAALRSVRFHDLGI |
| | | ATCTCCACGTACGCCTCCCCGCCCCCCGACCCCGCCGCCGCCTCGCCCTTCCCCTCCCACCTCATGCC | STYASPPPDPAAASPFPSHLMPL |
| | | CCTCTGGGAGGCGTACACCGCCGGCGCGCCCGCCCCGCTCGCGGCTCTCCTCGGCAAGCTCTCCGCCT | WEAYTAGAPAPLAALLGKLSASY |
| | | CCTACCGCCGCGTCGTCGTCGTGTACGACCGCATCAACGACTTCGCTGCACAGGAGGCGGCGCGGCTG | RRVVVVYDRINDFAAQEAARLRN |
| | | CGCAACGGCGAGGCGTTCGTCATGTACTGCCTGGCCGTGTCGATGCTCGCTAGGAGGATTGCTCCCCA | GEAFVMYCLAVSMLARRIAPQEH |
| | | GGAGCACCAACGGATCCTGCGCGAGAACGGCCTCACCAACATCACCGTGGAGGACTGTGCAACGGAGG | QRILRENGLTNITVEDCATEEFV |
| | | AGTTCGTGGATTACATCAGACGGACGAGGGCGACCAAGGAGATGTCGCCTGCCAGAGGTATCCTGACC | DYIRRTRATKEMSPARGILTNTC |
| | | AACACGTGTCGCGCGCTCGAGGGCGAGTTCGTCGACGCCGTCGCGGGGAACCTGGCCGCCGACGGCAA | RALEGEFVDAVAGNLAADGKKVF |
| | | GAAAGTTTTCACCGTCGGACCGTTGAACCCACTGCTGCATGCACGCGAACGCGTGGAAGCAGGGCGAC | TVGPLNPLLHARERVEAGRPAAQ |
| | | CAGCGGCGCAGCGCCACGAGTGCCTGGACTGGCTCGACAAGCAGCCCCCGGCGTCAGTGCTGTACGTC | RHECLDWLDKQPPASVLYVSFGT |
| | | TCCTTCGGCACGACATCGTCGCTGCGCGCGGAGCAAATCGAAGAGCTCGCATCGGCGCTGCGCGGCAG | TSSLRAEQIEELASALRGSNQRF |
| | | CAATCAGCGGTTCATCTGGGTGCTGCGCGACGCCGACCGCGGCGACATATTCGCGGACTCCGGCGAGA | IWVLRDADRGDIFADSGEIISRH |
| | | TCATCAGCCGCCACGCGAAGCTGCTGCGCGAGTTCACGCAGCACACCGAAGGGAGTACGGGGCTGGTG | AKLLREFTQHTEGSTGLVITGWA |
| | | ATCACCGGGTGGGCGCCGCAGCTGGAGATCCTCGCGCACGGCGCCACGGCGGCGTTCATGAGCCACTG | PQLEILAHGATAAFMSHCGWNST |
| | | CGGCTGGAACTCCACCATGGAGAGCCTGAGCCACGGGAAGCCGATTCTTGCCTGGCCCATGCACTGCG | MESLSHGKPILAWPMHCDQPWDA |
| | | ACCAGCCATGGGACGCCGAGCTCCTCTGCAAGTACCTCAAGGCCGGCGTCCTCGTGCGGCCATGGGAG | ELLCKYLKAGVLVRPWEKHNEIT |
| | | AAGCACAACGAGATCACGCTGGCGAAGGACATCCAGGAAGCCATCGAGGAGGCCATGCTTTCTGACGG | LAKDIQEAIEEAMLSDGGVAMRQ |
| | | AGGAGTAGCCATGCGACAACGTGCACGGGAGCTCGGAGATGCCATCCGTTCCTCCGTGGCCGCCGCCG | RARELGDAIRSSVAAAGSSRKDL |
| | | GCTCGTCGCGCAAAGACCTGGATGACTTCGTTGCTTACATCACGAGGTAA | DDFVAYITR* |
| | | SEQ ID NO: 181 | SEQ ID NO: 182 |
| 92 | Xa21_Os04g0571600 | ATGACGACCTGCGCGGATGACCAGACGGGCTGCGCCTTCTTCGCCCCCTTGCTGTCCTCCAAGGGGGC | MTTCADDQTGCAFFAPLLSSKGA |
| | | GGAGGTCGTCATCTTGGTGGCCGGCGATGAGGCGGAGGAGCAGCAGCCGGCGCCGGTGCTGACGAGCA | EVVILVAGDEAEEQQPAPVLTSK |
| | | AGCCGCCGGGTCGGCTCGCCAAGGCGGTGAACGAAGCCTGGTCCGTTTCTTTGGGCGTCGCGTTCCCG | PPGRLAKAVNEAWSVSLGVAFPV |
| | | GTGACGCCGTCCATGTTCACCTGCTCGGCACGGGGCGAGGCGCGGTCCATTCTTGGCCTCGCATTCCC | TPSMFTCSARGEARSILGLAFPM |
| | | GATGATACTGACGGGTTTGCTGCTCTATCTCCGGTCGATGATCTCGATGCTATTCCTTGGTCACCTCG | ILTGLLLYLRSMISMLFLGHLGG |
| | | GCGGGCTGGCCCTCGCCGGCGGGTCCCTCGCCATCGGATTCGCCAATATTACCGGCTACTCTGTCCTC | LALAGGSLAIGFANITGYSVLSG |
| | | TCCGGCCTCGCCATGGGCATGGAGCCGATATGCGGTCAGGCCTTCGGCGCGGGCAATTACGCGCTCCT | LAMGMEPICGQAFGAGNYALLGV |
| | | GGGCGTCACCATGCAGCGGACGGTGCTCCTCCTCATCGCGGCCGCCATCCCCATAGGTGGCCTGTGGG | TMQRTVLLLIAAAIPIGGLWVQM |
| | | TGCAGATGCGGCCTCTCCTCCTCTTCTGTGGCCAGGACGCCGCCATCGCGGCGGTCGCCGAGACCTAC | RPLLLFCGQDAAIAAVAETYIFA |
| | | ATTTTCGCGTCTCTCCCTGACCTCGTTCTCCAGGCATTCCTCCACCCGGTGAGGATATACCTCAGGAC | SLPDLVLQAFLHPVRIYLRTQSI |
| | | GCAATCCATCAACCTGCCCCTCACCGTGTGCGCCGGCCTGGCCATTGCCATCCACCTCCCCATCAACT | NLPLTVCAGLAIAIHLPINYVLV |
| | | ACGTTCTCGTAGTCGTCCTCGGCCTCGGCGTAAAGGGGGTCGCATTGGCGTCCGTGCTGGCCAACTTG | VVLGLGVKGVALASVLANLNLVL |
| | | AACCTCGTGCTCTTCCTCCTCGCCTACATCTTCTTGAAAGGCGTCCACAAGCGCACCGGCGGTTTCCT | FLLAYIFLKGVHKRTGGFLLSAE |
| | | TCTGTCCGCCGAGAGCTTCCGTGGCTGGGGCGAGCTCATCAGCCTCGCGCTGCCGAGCTGCGTGAGCG | SFRGWGELISLALPSCVSVCLEW |
| | | TCTGCCTCGAGTGGTGGTGGTACGAGATCATGATCCTGCTGTGCGGCCTGCTGCTGAACCCGCAGGCG | WWYEIMILLCGLLLNPQATVASM |
| | | ACGGTGGCGTCCATGGGCATACTGATCCAGACCACGTCGCTCATATACATCTTCCCTTCGTCGCTCAG | GILIQTTSLIYIFPSSLSFGVST |
| | | CTTCGGCGTGTCCACCCGCGTGAGCAACGAGCTAGGCGCGGGGCAGCCCGAGGAGGCGAGCCGCGCAG | RVSNELGAGQPEEASRAATVGLV |
| | | CCACGGTGGGGCTCGTGCTCGGCTTCGGGTTCGGCGCCTTCGCCTCCGCGTTCGCGTTCCTCGTGCGC | LGFGFGAFASAFAFLVRNVWASM |
| | | AACGTGTGGGCGAGCATGTTCACGGCCGACCCGGCCATCGTCGCGCTCACCGCGTCCGTGCTGCCCAT | FTADPAIVALTASVLPILGLCEL |
| | | CCTGGGCTTGTGCGAGCTCGGCAACTGCCCGCAGACGACGGGGTGCGGGGTGCTGCGCGGCAGCGCGC | GNCPQTTGCGVLRGSARPKDAAS |
| | | GGCCCAAGGACGCCGCGAGCATCAACCTCCGCTCCTTCTACCTCGTCGGGACGCCCGTGGCGCTCGTC | INLRSFYLVGTPVALVMAFWFHL |
| | | ATGGCGTTCTGGTTCCACTTGGACTTCAGGGGCCTCTGGTTCGGCCTGCTCGCGGCGCAGGCTACCTG | DFRGLWFGLLAAQATCTVRMLLV |
| | | CACGGTGCGCATGCTGCTGGTCATCGGCCGGACGGACTGGGCGGCCGAGGCCAAGCGGTCCAAGCAGC | IGRTDWAAEAKRSKQLTGAGAAN |
| | | TCACCGGAGCGGGCGCCGCCAACATGGAGAGTGACGACAGAGTTGCCGCGGACGAGAAGTTGCGCTTA | MESDDRVAADEKLRLPVDTDVER |
| | | CCCGTCGACACGGACGTGGAGCGATCGAGCGATCACACTGATCGGTGTTGA | SSDHTDRC* |
| | | SEQ ID NO: 183 | SEQ ID NO: 184 |
| 93 | Xa21_Os04g0572400 | ATGGAGTGGGCGTACTACGGCAGTGGGTACTCCTCGTCGGGGTCGCCGTCGCCGGTGGGCGGCGACGG | MEWAYYGSGYSSSGSPSPVGGDG |
| | | GGACGAGGACTCGTACATGACGGTGTCGTCGGCGCCGCCCAAGCGGCGGGCGGGGAGGACCAAGTTCA | DEDSYMTVSSAPPKRRAGRTKFK |
| | | AGGAGACGAGGCACCCGGTGTACAAGGGCGTGCGCAGCAGGAACCCCGGGAGGTGGGTCTGCGAGGTG | ETRHPVYKGVRSRNPGRWVCEVR |
| | | CGCGAGCCGCACGGCAAGCAGAGGATCTGGCTCGGCACCTTCGAGACCGCCGAGATGGCGGCGCGCGC | EPHGKQRIWLGTFETAEMAARAH |
| | | GCACGACGTCGCGGCGATGGCGCTGCGCGGCCGCGCCGCCTGCCTCAACTTCGCCGACTCGCCGCGCA | DVAAMALRGRAACLNFADSPRRL |
| | | GGCTCCGCGTGCCGCCGCTGGGGGCCGGGCACGAGGAGATACGCCGCGCCGCGGTCGAGGCCGCCGAG | RVPPLGAGHEEIRRAAVEAAELF |
| | | CTGTTCCGCCCGGCGCCCGGGCAGCACAATGCGGCCGCCGAGGCGGCGGCCGCTGTCGCTGCGCAGGC | RPAPGQHNAAAEAAAAVAAQATA |
| | | AACCGCGGCGAGCGCGGAGCTCTTTGCCGATTTCCCTTGCTACCCGATGGACGGACTGGAATTCGAAA | ASAELFADFPCYPMDGLEFEMQG |
| | | TGCAGGGGTACCTCGACATGGCACAGGGAATGCTCATCGAGCCGCCGCCAGTGACAGGGCAATCGACG | YLDMAQGMLIEPPPVTGQSTWAE |
| | | TGGGCAGAGGAGGACTACGACTGCGAGGTCAATCTATGGAGCTACTGA | EDYDCEVNLWSY* |
| | | SEQ ID NO: 185 | SEQ ID NO: 186 |
| 94 | Xa21_Os04g0584600 | ATGGGCAACGCATGCGGCGGTTCCCTTAGATCCAAGTACCTGAGCTTCAAGCAGACCGCGTCGCAGCG | MGNACGGSLRSKYLSFKQTASQR |
| | | CCACGACACCGACGTCGACAACAACAACGCCGCCGCGGCCGACTCGCCGAAGAAGCCCTCCCGCCCTC | HDTDVDNNNAAAADSPKKPSRPP |
| | | CAGCAGCCGCCAAGACGGACCTCTACGCCATGGGCAGGAAGCTCGGGCAGGGGCAGTTCGGCACCACC | AAAKTDLYAMGRKLGQGQFGTTY |
| | | TACCTCTGCACCGAGCTGTCCACTGGGGTGGACTACGCCTGCAAGTCCATTTCCAAGCGCAAGCTCAT | LCTELSTGVDYACKSISKRKLIT |
| | | CACCAAGGAGGACATCGAAGACGTTCGCCGCGAGATCCAGATCATGCACCATCTCTCGGGCCACAAGA | KEDIEDVRREIQIMHHLSGHKNV |
| | | ACGTCGTCGCCATCAAGGGCGCCTACGAGGACCAGCTATACGTGCACATCGTCATGGAGCTCTGCGCC | VAIKGAYEDQLYVHIVMELCAGG |
| | | GGCGGCGAGCTCTTCGATCGCATCATACAGCGCGGCCACTACAGCGAGCGGAAGGCCGCCGAGCTCAC | ELFDRIIQRGHYSERKAAELTRI |
| | | GCGGATCATCGTTGGGGTCGTCGAGGCCTGCCACTCGCTCGGGGTCATGCACCGGGACCTCAAGCCAG | IVGVVEACHSLGVMHRDLKPENF |
| | | AAAACTTCCTGCTTGCCAACAAGGACGATGACCTCTCGCTCAAGGCCATAGATTTTGGTCTCTCAGTC | LLANKDDDLSLKAIDFGLSVFFK |
| | | TTCTTCAAGCCCGGTCAAACTTTTACCGATGTTGTCGGAAGCCCATATTACGTAGCTCCAGAAGTGTT | PGQTFTDVVGSPYYVAPEVLLKH |
| | | GTTGAAACACTATGGACCAGAAGCTGATGTATGGACTGCAGGTGTCATTCTCTACATTTTACTAAGTG | YGPEADVWTAGVILYILLSGVPP |
| | | GTGTACCTCCATTCTGGGCAGAGACACAACAAGGAATATTTGATGCTGTACTAAAAGGCTTCATTGAT | FWAETQQGIFDAVLKGFIDFDSD |
| | | TTTGATTCTGATCCTTGGCCTGTGATCTCTGATAGTGCAAAGGATCTTATAACAAAAATGCTCAATCC | PWPVISDSAKDLITKMLNPRPKE |
| | | TCGCCCAAAGGAACGCTTAACAGCACATGAAGTTCTATGCCATCCATGGATTCGTGATCACGGAGTTG | RLTAHEVLCHPWIRDHGVAPDRP |
| | | CTCCAGATCGGCCTCTTGATCCAGCTGTCCTATCTCGCATCAAGCAGTTCTCTGCAATGAATAAGTTG | LDPAVLSRIKQFSAMNKLKKMAL |
| | | AAGAAGATGGCTTTGCGGGTAATAGCTGAGAGTCTCTCAGAGGAGGAAATCGCTGGGTTGAAGGAAAT | RVIAESLSEEEIAGLKEMFQTMD |
| | | GTTTCAGACTATGGATGCTGATAACAGTGGTGCGATCACATATGATGAGCTTAAAGAAGGCTTGAGAA | ADNSGAITYDELKEGLRKYGSTL |
| | | AATATGGCTCAACACTTAAGGACACCGAGATTCGTGATCTTATGGATGCAGCAGATATAGACAACAGC | KDTEIRDLMDAADIDNSGTIDYI |
| | | GGAACAATTGATTATATCGAATTCATTGCTGCAACATTGCATCTCAATAAACTGGAGCGAGAGGAACA | EFIAATLHLNKLEREEHLVAAFS |
| | | TCTTGTGGCAGCTTTTTCATATTTTGACAAAGATGGAAGTGGTTACATCACAGTGGATGAACTGCAGC | YFDKDGSGYITVDELQQACKEHN |
| | | AAGCTTGCAAAGAGCATAACATGCCCGATGCTTTTCTTGATGATGTCATCAATGAAGCTGATCAGGAC | MPDAFLDDVINEADQDNDGRIDY |
| | | AATGATGGGCGCATTGACTATGGAGAATTTGTTGCCATGATGACCAAGGGCAATATGGGAGTCGGACG | GEFVAMMTKGNMGVGRRTMRNSL |
| | | AAGAACAATGAGAAACAGCTTGAATATCAGCATGAGGGACGCACCTGGTGCACTCTAAG | NISMRDAPGAL* |
| | | SEQ ID NO: 187 | SEQ ID NO: 188 |
| 95 | Xa21_Os04g0610400 | ATGGCTCCCAGGAACGCCGCCGAGGCCGTCGCCGTCGCCGTGGCGGAGGGCGGAGGGGCCGGCATGGA | MAPRNAAEAVAVAVAEGGGAGME |
| | | GCCCAGGTTCCGCGGCGTGAGGAAGCGCCCGTGGGGCAGGTACGCGGCGGAGATCCGCGACCCGGCGA | PRFRGVRKRPWGRYAAEIRDPAR |
| | | GGAAGGCGCGGGTGTGGCTCGGCACCTTCGACACCGCCGAGGCCGCGGCGCGCGCCTACGACAGCGCC | KARVWLGTFDTAEAAARAYDSAA |
| | | GCGCTCCACTTCCGCGGGCCCAAGGCCAAGACCAACTTCCCCGTCGCCTTCGCGCACGCCCACCACCA | LHFRGPKAKTNFPVAFAHAHHHA |
| | | CGCCCCGCCGCCGCCGCTGCCCAAGGCGGCGGCGCTGGCCGTCGTCAGCCCGACCAGCAGCACGGTCG | PPPPLPKAAALAVVSPTSSTVES |
| | | AGTCGTCCTCCCGGGACACGCCCGCCGCCGCGCCGGTGGTGGCCGCGGCCAAGGCCCAGGTGCCCGCC | SSRDTPAAAPVVAAAKAQVPAAP |
| | | GCGCCCTCGCTCGATCTGAGCCTCGGGATGTCGGCCATGGTGGCCGCACAGCCGTTCCTGTTCCTCGA | SLDLSLGMSAMVAAQPFLFLDPR |
| | | CCCAAGGGTCGCGGTGACCGTGGCCGTCGCGGCGCCGGTGCCTCGCCGGCCGGCCGTCGTCAGCGTCA | VAVTVAVAAPVPRRPAVVSVKKE |
| | | AGAAGGAGGTAGCTCGCCTGGACGAGCAGAGCGACACCGGCTCGTCGTCATCCGTGGTGGACGCCTCG | VARLDEQSDTGSSSSVVDASPAV |
| | | CCGGCCGTCGGCGTGGGGCTCGACCTGAACCTGCCGCCGCCGACCGAGGAGGCGTAG | GVGLDLNLPPPTEEA* |
| | | SEQ ID NO: 189 | SEQ ID NO: 190 |
| 96 | Xa21_Os04g0635100 | ATGGCGGGTGCAGCGAAGGCGTCGTGGATGGTGGCGATGAGCGTGGGCGCCGTGGAGGCGCTCAAGGA | MAGAAKASWMVAMSVGAVEALKD |
| | | CCAGGGCGGACTCTGCCGCTGGAACTACGCGCTGCGGTCCATCCACAAAGCAGCCAAGGCCAACGCCG | QGGLCRWNYALRSIHKAAKANAA |
| | | CCGGCGTCTCGCAGGGCAAGAAGCTGCCTGCTTCTGCGGCGGCAGTGGCGGAGAGGAGGAGAGCGGAG | GVSQGKKLPASAAAVAERRRAEK |
| | | AAAGCCGAGGAGGGGTTGAGGACAGTCATGTACCTCAGCTGCTGGGGTCCCAATTAG | AEEGLRTVMYLSCWGPN* |
| | | SEQ ID NO: 191 | SEQ ID NO: 192 |
| 97 | Xa21_Os04g0639200 | ATGGCGGCGGCGGCGGCGCGCGCGATCATATGCGAGATGGCACCGCAGAGGGGGGCGGCGGCGGCGGC | MAAAAARAIICEMAPQRGAAAAA |
| | | GCCGCCGGCGCAGCAGCAGGCGACGACGAGACGAGACGGTGGGAAGATCATGCTCCAGCCACGCCTCT | PPAQQQATTRRDGGKIMLQPRLC |
| | | GCACGCTCCGGTCGTACGGCGCCGGCAGCGGCGTGGTGGCGCGGAGGCGGGTGGTGGAGGAGGAGGAG | TLRSYGAGSGVVARRRVVEEEES |
| | | AGCGGCGGCGGCGGCGCGGGGTCCTCCCCGTTCTTCGCGTCGCTCGCCGACTACATCGAGAGCACCCG | GGGGAGSSPFFASLADYIESTRK |
| | | CAAGAGCCAGGACTTCGAGACCATCTCCGGCCGCCTCGCCATGGTGGCGTTCGCGACGGCGGTGGCGG | SQDFETISGRLAMVAFATAVAVE |
| | | TGGAGTTGACGACGGGGAACTCGCTGTTCAAGAAGCTGGACATGCAGGAGATCGAGGAGGCGGCCGGG | LTTGNSLFKKLDMQEIEEAAGVC |
| | | GTATGCCTCGCCGTGGTCGCCGGCGCCGCCGCGTTCGCGTGGGTGTCCAGCGCGCGCACCAGGATCGG | LAVVAGAAAFAWVSSARTRIGQM |
| | | CCAGATGTTCACGCTGGGTTGCAGCGCCTTCGTCGACTCGCTCATCGACAACATCGTCGAAGCTCTCT | FTLGCSAFVDSLIDNIVEALFSE |
| | | TCTCCGAGGGCGAGCTGCAGGACTGGTCCGACGACGTATGA | GELQDWSDDV* |
| | | SEQ ID NO: 193 | SEQ ID NO: 194 |
| 98 | Xa21_Os04g0685300 | ATGGGTTCGGCGAGCCGCGCGGTGTCGTGCCTGTGCTGCCCGTGCAAGTGCCTGGCGTGCGGCCTCTT | MGSASRAVSCLCCPCKCLACGLF |
| | | CAGCTGCCTCTGCAGCATCCTCATCTCCCTCCTCGTCACCCTCGGCGTCCTCGCCCTCATCTTCTACC | SCLCSILISLLVTLGVLALIFYL |
| | | TCATCTTCCGCCCCCACATGATCGCCGCCACCGTCGACTCCGCCGCCCTCACCCAGTTCACCCTCTCC | IFRPHMIAATVDSAALTQFTLST |
| | | ACCAACTCCGCCCTCGCCTACAGCCTCACCGTCGACCTCACCGTCCGCAACCCCAACAAGCGCGTCGG | NSALAYSLTVDLTVRNPNKRVGL |
| | | CCTCTACTACGACAACGTCGAGTCCCTCGCCCTCTTCGACGGCCAGCGCTTCGGCTACGTGCCCCTCG | YYDNVESLALFDGQRFGYVPLDS |
| | | ACTCCTTCTACCAGTCCACCGAGGCATCCACCAAGCTCTCCCCCGCCTTCAAGGGCCAGCAGCCGCTC | FYQSTEASTKLSPAFKGQQPLQG |
| | | CAAGGCGACATCACCGCCGCCAACTTCAGGACGCAGCAGGCCGCCGGCAAGTTCGACATCGAGGTCAA | DITAANFRTQQAAGKFDIEVKLN |
| | | GCTCAACGCCAAGCTCAGGGTCAAGGTCTGGGCCTTCAAGGTTCCCGGACCCAAGGCCAAGATCAGCT | AKLRVKVWAFKVPGPKAKISCPI |
| | | GCCCCATCACCGTCCCAGCGTCCGCCCCCAACGCCCCCGCATTCCAGCGCACCGACTGCAAAGTATGG | TVPASAPNAPAFQRTDCKVWF* |
| | | TTCTGA SEQ ID NO: 195 | SEQ ID NO: 196 |
| 99 | Xa21_OsJ_24689 | ATGGCTCCTCTCTTCTTCCTCCTCCTCTTCAGCCAAATCTTTCTCTGCACCGCGGTGGACACCATCAA | MAPLFFLLLFSQIFLCTAVDTIN |
| | (Os07g0553633) | CTCCACCGCGCCGCTGTCCGGGACGCAGAAGATCGTCTCCAAGGGCGGCAGGTTCGCCCTTGGATTCT | STAPLSGTQKIVSKGGRFALGFY |
| | | ACACCCCGCCACAAGGTAACAACACCGCCTCCGGCACCGGCAACTACTACATAGCTATATGGTACAAC | TPPQGNNTASGTGNYYIAIWYNN |
| | | AACATACCGTTGCAGACGACGGTGTGGACGGCCAACAGCGACGTGCCGGTGTCTGACCCGACCACCGC | IPLQTTVWTANSDVPVSDPTTAS |
| | | ATCCTTGTCCATCGGCAGCGATGGCAATCTTGTCCTCCTTGATCAATCCAAGAACAGGCAGCTGTGGT | LSIGSDGNLVLLDQSKNRQLWST |
| | | CGACCAACGTAAGTGTGGCCTCCAACTCCACCGTTGCCGTCATCCAGGACGGCGGTAGCCTCGACCTC | NVSVASNSTVAVIQDGGSLDLMD |
| | | ATGGATGCCACCAATTCATCCATAGTCTACTGGAGGAGCATAGATCATCCGACAAACACCTGGCTTCC | ATNSSIVYWRSIDHPTNTWLPGG |
| | | GGGCGGCAAGCTGGGGCTGAACAAGACCACTGGTGTGAGCCAGCGGCTTGTCCCATGGAGGAACAATG | KLGLNKTTGVSQRLVPWRNNANP |
| | | CAAACCCGTCCCCTGGGCTGTTCTCCCTTGAGCTGGATCCCAACGGCACAACGCAGTACTTCATCCAG | SPGLFSLELDPNGTTQYFIQWND |
| | | TGGAACGACTCCATCACTTACTGGACCAGCGGCCCTTGGAACGGTAATATCTTCAGTCTTGTGCCCGA | SITYWTSGPWNGNIFSLVPEMTA |
| | | GATGACGGCCGGTTACAACTACAACTTCCGGTTCATTAACAATGTCTCGGAGAGCTACTTCATATACT | GYNYNFRFINNVSESYFIYSMKD |
| | | CCATGAAGGATGACTCGATCATCTCGCGGTTCACCATTGATGTGAATGGGCAGATCAAGCAGTGGACA | DSIISRFTIDVNGQIKQWTWVPA |
| | | TGGGTACCAGCCTCGGAGAATTGGATCTTGTTCTGGTCCCAGCCACGGACGCAGTGTGAGGTGTACGG | SENWILFWSQPRTQCEVYGLCGA |
| | | GCTCTGCGGCGCATATGGAAGTTGCAACCTCAATGTCCTGCCGTTCTGCAACTGCATCAAGGGGTTCA | YGSCNLNVLPFCNCIKGFSQKFQ |
| | | GCCAGAAGTTTCAGAGTGATTGGGACCTCCAGGATTTTACTGGTGGGTGCAAGAGGAACGTACCGTTG | SDWDLQDFTGGCKRNVPLQCQTN |
| | | CAGTGCCAGACCAACTCAAGCTCTGCACAGACTCAGCCTGATAAGTTCTATTCCATGGTTAGTGTGAG | SSSAQTQPDKFYSMVSVRLPDNA |
| | | GCTACCTGATAATGCTCAGAGTGCAGTGGCCGCTAGTTCTCAGGCCTGTCAGGTTGCTTGCCTGAATA | QSAVAASSQACQVACLNNCSCNA |
| | | ATTGCTCATGTAATGCTTATACTTACAATAGTAGTGGCTGCTTTGTTTGGCACGGGGACTTGATTAAC | YTYNSSGCFVWHGDLINLQDQYN |
| | | CTCCAAGATCAATACAATGGGAATGGAGGAGGCACACTCTTCCTCAGGCTTGCAGCGTCTGAACTTCC | GNGGGTLFLRLAASELPDSKNSK |
| | | AGACTCTAAAAATAGCAAGAAAGTGATCATTGGTGCAGTTGTAGGTGGAGTTGCTGCAGCTTTGATAA | KVIIGAVVGGVAAALIILAIVLF |
| | | TCCTTGCAATTGTGTTGTTCATCGTATTCCAGAAATGCCGCCGAGACAGGACTCTTCGCATATCCAAG | IVFQKCRRDRTLRISKTTGGALI |
| | | ACTACTGGGGGTGCACTGATTGCCTTCCGGTACAGTGATCTGCAGCATGTCACCAGCAACTTCTCAGA | AFRYSDLQHVTSNFSEKLGGGAF |
| | | GAAGCTGGGTGGAGGTGCCTTTGGCACAGTATTTAAAGGGAAGCTCCCAGATTCAACAGCCATTGCAG | GTVFKGKLPDSTAIAVKRLDGLS |
| | | TGAAGAGGCTTGATGGACTGAGCCAGGGGGAGAAGCAATTCCGTGCTGAGGTAAGCACCATCGGGACC | QGEKQFRAEVSTIGTIQHVNLVR |
| | | ATCCAACATGTCAATCTGGTTCGCCTACTTGGTTTCTGCTCTGAAGGATCAAGAAGACTGCTTGTCTA | LLGFCSEGSRRLLVYEYMPKGSL |
| | | TGAGTACATGCCAAAGGGCTCCCTGGAATTGCAGCTGTTCCATGGTGAGACAACGGCACTGAACTGGG | ELQLFHGETTALNWAIRYQIALG |
| | | CCATAAGGTATCAAATTGCACTTGGAACAGCAAGGGGCCTAAATTACCTGCATGAAAAATGTAGGGAT | TARGLNYLHEKCRDCIIHCDVKP |
| | | TGCATAATACACTGTGATGTTAAGCCAGATAACATACTTTTGGATGAGTCATTTGTACCCAAAGTGTC | DNILLDESFVPKVSDFGLAKLLG |
| | | TGACTTTGGTCTAGCAAAGCTCTTAGGGCGGGATTTCAGCCGTGTTTTGACAACAATGAGAGGGACAA | RDFSRVLTTMRGTRGYLAPEWIS |
| | | GGGGTTACCTTGCGCCTGAGTGGATCAGTGGTGTGCCGATTACTCCTAAGGCAGATGTCTTCAGCTAT | GVPITPKADVFSYGMMLFELISG |
| | | GGCATGATGCTCTTCGAACTCATATCAGGCAGAAGGAATGCTGATCTAGGGGAGGAGGGAAAGTCCTC | RRNADLGEEGKSSFFPTLAVNKL |
| | | TTTCTTCCCAACTTTGGCTGTAAACAAACTACAGGAAGGTGATGTGCAGACCTTGTTAGACCCCAGGT | QEGDVQTLLDPRLNGDASADELT |
| | | TGAATGGAGATGCCAGCGCTGATGAGCTCACAAAAGCTTGCAAGGTTGCCTGCTGGTGTATCCAAGAT | KACKVACWCIQDDENARPTMGQV |
| | | GATGAAAATGCCAGACCTACAATGGGTCAGGTCGTCCAAATTTTAGAGGGATTCCTTGATGTCAACAT | VQILEGFLDVNMPPVPRSLKVLN |
| | | GCCTCCTGTTCCAAGGTCACTGAAGGTTCTTAATGAAAGCCCTGATGTCATAAATTTTTTCTCAGATG | ESPDVINFFSDVSSSQTSQMHNS |
| | | TTTCATCAAGTCAAACTTCGCAGATGCATAATAGCACAGCTTCTTCGCAGACAAAGAGTTCTACTTCA | TASSQTKSSTSGGSQFQSS* |
| | | GGTGGTTCACAATTTCAGAGCTCATAA SEQ ID NO: 197 | SEQ ID NO: 198 |
| 100 | Xa21_Os05g0322900 | ATGACGTCGTCGATGTCGCCGGCGCCGGCGCCGCCGTACGCGCAGGTGATGGAGGACATGGAGAAGGG | MTSSMSPAPAPPYAQVMEDMEKG |
| | | GAAGGAGCTGGCGGCGCAGCTGCAGGGGCTCCTCCGCGACTCGCCGGAGGCCGGCCGCATCGTCGACC | KELAAQLQGLLRDSPEAGRIVDQ |
| | | AGATCCTCCACACCTTCTCCCGGGCGATGCGGGCGCTCGACAAGGCGGCGGTCTCCGCCGCCGGAGGA | ILHTFSRAMRALDKAAVSAAGGE |
| | | GAAGGGTCGGAGGTGCAGAGCGAGGTCACCTGCGGGGGCGGGGCCAGCGCCGGCGGGAAGAGGAAAGC | GSEVQSEVTCGGGASAGGKRKAP |
| | | CCCCGCCGCCGACCGGAAGGCCAACTGCCGCAGGAGGACGCAGCAATCGTCCGGGAATACGGTGGTCG | AADRKANCRRRTQQSSGNTVVVK |
| | | TCAAGAACCTCGACGACGGCCAGGCATGGCGCAAGTACGGGCAGAAGGAGATCCAAAACTCCAAGCAC | NLDDGQAWRKYGQKEIQNSKHPK |
| | | CCAAAGGCCTACTTCCGGTGCACGCACAAGTACGACCAGCTGTGCACGGCGCAGCGGCAGGTGCAGCG | AYFRCTHKYDQLCTAQRQVQRCD |
| | | CTGCGACGACGACCCGGCGAGCTACAGGGTCACCTACATCGGCGAGCACACCTGCCGGGACCCGGCCA | DDPASYRVTYIGEHTCRDPATAP |
| | | CCGCCCCCATCATCGCGGCGCACGTCATCCACCAGGTCGCCGCCGGCGACGACGACGACGGCTGCGGC | IIAAHVIHQVAAGDDDDGCGGLH |
| | | GGCCTCCACGCGGGGTCCCGCCTCATCAGCTTCGTCGCCGCGCCGGCGGCGCCAGTAGACGCTGCCGC | AGSRLISFVAAPAAPVDAAAAPT |
| | | GGCGCCGACGACCAGCACGATCACCACGGTCACCGCGCCGGGCCCGCTGCAGCAGCCGCTCAAGGTGG | TSTITTVTAPGPLQQPLKVEGGV |
| | | AGGGCGGCGTCGGCTCGTCCGACCAGGAGGAGGTGCTGAGCAGCCTCACGCCCGGCAGCTCCGCGGTG | GSSDQEEVLSSLTPGSSAVRGGG |
| | | CGCGGCGGCGGCGGGGGCGCGGGTCCCTTCGGGCCGGACCAGGGCGATGTCACGTCCTCGCTGCACTG | GGAGPFGPDQGDVTSSLHCSYDA |
| | | CAGCTACGACGCCGACGCCTTCGCCGTCGCCGGCATGGAGTTCTTCAAGGACGACGAGGTTGTCTTCA | DAFAVAGMEFFKDDEVVFNLDDI |
| | | ATCTGGACGACATTATGGGTTTGAGCTTTTGA SEQ ID NO: 199 | MGLSF* SEQ ID NO: 200 |
| 101 | Xa21_OsI_19719 | ATGGGCGGGTGCTTGTCCGGCGACGTGCGCGGCGGCATGGAGGCCGTGGGCGGGAGCGGTGGCCGCGG | MGGCLSGDVRGGMEAVGGSGGRG |
| | (Os05g0373300) | GGCGGCGGGGACCGGAGGAGGAGGGGGAGGAGTGGCGGGGCAGGGCGGCGGGGCGAACGAGGCGGTGG | AAGTGGGGGGVAGQGGGANEAVD |
| | | ACCACTTCTTCAACGCCGCCGGCCTCCGCGGCCTCTACTCGCCTCTCGAGCTATCCTTTTCAGCATCA | HFFNAAGLRGLYSPLELSFSASK |
| | | AAGTTGAGGAATATGGATGCTTTTTCCAAGAGTGATCCAATGTTAGTGATCTACATAAGAAAGGACAC | LRNMDAFSKSDPMLVIYIRKDTR |
| | | AAGGCTAGAAGAGATTGGCCGTACTGAAGTGATACTGAACTCTCTGGAACCCTCGTGGATCACAAAGG | LEEIGRTEVILNSLEPSWITKAT |
| | | CTACAATAAGTTACCAATTTGAGATTATACAGCCGCTTGTATTCAAGATATATGACATTGACACAAGG | ISYQFEIIQPLVFKIYDIDTRYH |
| | | TACCATAACACGCCAGTCAAGACGCTGAACTTGGCTCAGCAAGATTTTCTTGGAGAAGCATGCTGCAA | NTPVKTLNLAQQDFLGEACCNLS |
| | | TTTGTCAGAGATTGTCACAAACAATCACAGCCTGACACTTAACCTCAGAGATAGTTGTGGACATGCCC | EIVTNNHSLTLNLRDSCGHALLG |
| | | TTCTAGGAACAGTGACAGTACATGCTGAAGAAAGTAATTCGTCAAGGATGGCAGTTGAGATGACACTC | TVTVHAEESNSSRMAVEMTLHAL |
| | | CATGCCCTAAACTTGGAAAACAAAGATGTATTTTCCAAAAGTGATAACCCATTGCTAGTTGAGTGTTT | NLENKDVFSKSDNPLLVECFDFD |
| | | TGATTTTGATTCAAGTGGTGACCACGAACTTATTGGGGCCTTCCAGACAACTATCACTCAACTTGAGA | SSGDHELIGAFQTTITQLENLYN |
| | | ATCTATATAATTCAAAGTCTGGAGCAAACTTTTTCAGCCATAAGGGACAGAAAAAGTTGAAGGGACAA | SKSGANFFSHKGQKKLKGQLFVD |
| | | TTGTTTGTGGATAAGTTCCAGGAAAAAGTTCAACATACTTTCTTGGACTACATTTCCAGTGGTTTTGA | KFQEKVQHTFLDYISSGFELNFM |
| | | GCTAAATTTTATGGTGGCTGTAGATTTCACGGCTTCAAATGGTGACCCCCGTTCACCTCAGTCTTTGC | VAVDFTASNGDPRSPQSLHYIDP |
| | | ACTACATTGACCCCTCTGGCAGACCGAACTCATACCAGCAGGCAATACTAGGGGTTGGCGAAGTTCTG | SGRPNSYQQAILGVGEVLQFYDN |
| | | CAGTTTTATGACAATGATAGGCGATTCCCGGCATGGGGTTTTGGAGCGAAGACACCACAGGGCTACAT | DRRFPAWGFGAKTPQGYISHCFN |
| | | ATCCCACTGTTTTAATCTGAATGCAACTACCAATGATTGCGAGGTCGTCGGAGTTGAAGGCATCATGT | LNATTNDCEVVGVEGIMSAYTST |
| | | CAGCATACACCTCTACCCTTTACAGTGTCACCCTTGCTGGGCCAACTCTGTTTGGGCCAATTATCAAC | LYSVTLAGPTLFGPIINKAAEIA |
| | | AAAGCTGCCGAGATTGCCAGCCACTCCCTTCAATACGGAAACAACAAATACTTTGTCCTACTCATCAT | SHSLQYGNNKYFVLLIITDGVLT |
| | | CACGGATGGAGTTCTCACTGACATTCAAGAAACAAAAGATTCTATCGTGAGGGCATCTGATCTGCCAT | DIQETKDSIVRASDLPLSILIVG |
| | | TGTCAATCCTCATCGTGGGCGTTGGAAATGCTGATTTCAAGCAAATGGAGATCCTGGATGGAGATAAC | VGNADFKQMEILDGDNGKRLESS |
| | | GGCAAGCGGCTGGAGAGCTCGACCGGCAGGATCGCGACGCGGGACATCGTCCAGTTCGTCCCCATGAG | TGRIATRDIVQFVPMRDVQGGQI |
| | | GGATGTCCAAGGCGGGCAGATCTCCGTCGTCCAGTCGCTGCTGGAGGAGCTCCCGGGCCAGTTCCTGG | SVVQSLLEELPGQFLAYMRSRDI |
| | | CCTACATGCGCAGCCGGGACATCAAGCCGCGAGCCCCGCTGCAGCACGACAACGCCTCTTCCGCTCCG | KPRAPLQHDNASSAPPLYPPTK* |
| | | CCCCTTTACCCTCCAACCAAGTGA SEQ ID NO: 201 | SEQ ID NO: 202 |
| 102 | Xa21_Os05g0453700 | ATGGCCGGTGGCGGCAGGGCCGATGACGAGCGAAGGATCGGGGTGGCGATGGACTACTCGGCGAGCAG | MAGGGRADDERRIGVAMDYSASS |
| | | CAAGAGGGCGCTGGACTGGGCCATCGCCAACCTGCTCCGCCGGGGCGACCACCTCGTCGTCCTCCACG | KRALDWAIANLLRRGDHLVVLHV |
| | | TCCTGCATCACGGCGGGGAGGAGGCCAAGCACGCCCTGTGGGGCAAGTCCGGATCCCCGCTGATCCCT | LHHGGEEAKHALWGKSGSPLIPL |
| | | CTCTCCGAGTTCCGGGATCCGACGGCGATGCAGCAGTACGGCGTGCACTGCGACGCCGAGGTGCTCGA | SEFRDPTAMQQYGVHCDAEVLDM |
| | | CATGCTCGACACGGCGGCGCGCCAGTTGGAGCTTACCGTAGTGGCGAAGCTGTACTGGGGCGACGCCA | LDTAARQLELTVVAKLYWGDARE |
| | | GGGAGAAGCTCTGCGACGCCGTCGAGGAGCAGAAGATCGACACGCTCGTCATGGGCAGCCGCGGCCTC | KLCDAVEEQKIDTLVMGSRGLGS |
| | | GGCTCGATCCAGAGGATTCTTCTGGGGAGTGTGACAAACTACGTGCTGTCAAACGCATCATGCCCTGT | IQRILLGSVTNYVLSNASCPVTV |
| | | AACAGTCGTCAAGGGGAAGTGA SEQ ID NO: 203 | VKGK* SEQ ID NO: 204 |
| 103 | Xa21_OsI_20201 | ATGGAGGAGGATGGGGGAGGCGCGGGGAGGAGGAAGGAGCGGGTGGTGCTGATGTGGGGGTACCTCCC | MEEDGGGAGRRKERVVLMWGYLP |
| | | CGGGGTGTCGCAGCAGCGGTCGCCGCTGCTGGGGCCGGTGCCCGTGAGGATGCCGGGCGCGGCCGCGG | GVSQQRSPLLGPVPVRMPGAAAA |
| | | CGGCCGGTGATGCGTGGAGGGATGTGGCCGGCGGCGGGTGCGGCTTCGCGATGGCCGTCTCCGAGCAA | AGDAWRDVAGGGCGFAMAVSEQG |
| | | GGAAAACTCTTCACTTGGGGCTCTACCGATGATATGGGACAAAGTTACGTGACTGCTGGGAAGCATGA | KLFTWGSTDDMGQSYVTAGKHEE |
| | | GGAAACTCCGGAGGCATTTCCTCTTCCTAGTGATATTGCAATTGTAAGGGCTGACGCTGGATGGGCAC | TPEAFPLPSDIAIVRADAGWAHC |
| | | ATTGTGTTGCAATAACAGGTAAAGGTGATGTCTACACATGGGGTTGGAAAGAATGCGTTCCAACTGGA | VAITGKGDVYTWGWKECVPTGRV |
| | | AGGGTCATTGCAGACCATTCTGCAACTGGGGCTATGGATTGTGATAAAAGGCAAAGTGGGGTTGCCAC | IADHSATGAMDCDKRQSGVATDQ |
| | | TGACCAAGGAAACTCGATTACAGTGAGCCCCAGGTCAAAGGTGTCTAGGACAAACACCAAGGCAGCAT | GNSITVSPRSKVSRTNTKAASGP |
| | | CTGGTCCTGCTGAAAGCCGAAGTTCTGAGGATAGCACAAAGCGACGGAGGTTATCTTCATCGAAACAC | AESRSSEDSTKRRRLSSSKHGAE |
| | | GGGGCTGAAAGTGAATCATCTAGTGATGAAAATCTTTCAGCACCACCTTGTGTTGTGACATTTAATAC | SESSSDENLSAPPCVVTFNTGVK |
| | | AGGAGTGAAGATAGCGGAAGTAGCTGCAGGTGGCCGTCATACATTAGTGCTGTCAGATTTTGGTCAGG | IAEVAAGGRHTLVLSDFGQVWGW |
| | | TCTGGGGTTGGGGCTATGGTGGGGAAGGACAACTAGGTTTAGGCTCTAGGATCCGGACAGTTTCCTCC | GYGGEGQLGLGSRIRTVSSPHPI |
| | | CCACATCCCATACCTTGTGTTCAATCGGCGTTCTACAGCAAGGACCGTACAGGAATTGTGATGGGTAG | PCVQSAFYSKDRTGIVMGSRTLE |
| | | CAGAACTTTGGAAGGAACAAATGATAGAGCAGCAACTTGCGTGAAAGCAATTGCCTGTGGAGGCCGTC | GTNDRAATCVKAIACGGRHSAVV |
| | | ATAGTGCTGTGGTGACAGATTCAGGAGCACTTCTTACATTTGGATGGGGATTATATGGACAGTGTGGA | TDSGALLTFGWGLYGQCGQGNTD |
| | | CAAGGGAACACGGATGATATTTTAAGCCCAACGTGTGTTTCGGCTATTATGGGAGTGAAGATACAACG | DILSPTCVSAIMGVKIQRVAAGL |
| | | TGTAGCAGCTGGGCTATGGCATACTGTATGTACATCTGCTGATGGTGATGTATATTCCTTTGGAGGTA | WHTVCTSADGDVYSFGGNQFGQL |
| | | ACCAGTTTGGGCAGCTGGGAACTGGATCAGATCAAGCTGAGATTGTTCCAAAGTTGGTAGAAGCCTCG | GTGSDQAEIVPKLVEASKLENKH |
| | | AAATTGGAAAATAAGCATGCAAGAGGTGTTTCGTGTGGAGCCCGACACAGTGCAGTCATAACAGATAA | ARGVSCGARHSAVITDKGDVFCW |
| | | AGGAGATGTCTTCTGCTGGGGTTGGAACAAGTACGGTCAGCTTGGTTTGGGCGACTCAACAGACAGAA | GWNKYGQLGLGDSTDRNVPCQVP |
| | | ACGTACCATGCCAAGTGCCCGTGGAAGCGTACAACCCGCTAAACGTTTCATGCGGTTGGTGGCACACG | VEAYNPLNVSCGWWHTLVLAEYP |
| | | TTGGTTCTCGCGGAATATCCTACCTGA SEQ ID NO: 205 | T* SEQ ID NO: 206 |
| 104 | Xa21_OsJ_19053 | ATGGTGGGGAGCTACGCGGCGGGAGGGGGGCGGGGCGCGGCGGTGGCGGCGGTGGCGGAGGGGAAGCT | MVGSYAAGGGRGAAVAAVAEGKL |
| | (Os05g0495700) | GGACGAGCTTCGGCGGAGGATGGGGAAGGCGGACGGCGACCTGCTGAGGATCGTCGGGGTGGGGGGCG | DELRRRMGKADGDLLRIVGVGGG |
| | | GGGCGTGGGGGAGCGCCTTCTGCGCGCTGCTGCAGGACGCGTACGGGCGGCACCGCGACAAGGCGCAG | AWGSAFCALLQDAYGRHRDKAQV |
| | | GTGCGGGTGTGGCGGAGGCCCGGGCGCGCCGTCGACCGCGCCACCGCCGAGCACCTCTTCGAGGTCAT | RVWRRPGRAVDRATAEHLFEVIN |
| | | CAACTCCCGGGAGGACGTCCTCCGCAGGCTCATCCGCCGCTGCGCCTACCTCAAGTACGTCGAGGCCC | SREDVLRRLIRRCAYLKYVEARL |
| | | GCCTCGGCGACCGCACGCTCTACGCCGACGAGATCCTCCGCGACGGCTTCTGCCTCAACATGGTCGAC | GDRTLYADEILRDGFCLNMVDTP |
| | | ACGCCGCTCTGCCCGCTCAAGGTCGTCACCAACCTGCAGGAGGCGGTCTGGGACGCCGACATAGTCAT | LCPLKVVTNLQEAVWDADIVING |
| | | CAACGGCTTGCCCTCCACCGAGACCAGGGAGGTGTTCGGGGAGATCGGGAGGTATTGGAAGGAGAGGA | LPSTETREVFGEIGRYWKERIRP |
| | | TCAGACCCCCCGTGATCATCTCGCTGGCCAAGGGGATCGAGGCGTCGATCGACCCCGTGCCCCGGATC | PVIISLAKGIEASIDPVPRIITP |
| | | ATTACCCCGACACAGATGATCAGCAATGCAACTGGAGTTCCATTGGAGAACATTCTATATCTTGGAGG | TQMISNATGVPLENILYLGGPNI |
| | | TCCTAACATTGCATCTGAGATATATAACAAAGAATATGCAAATGCTCGCATATGTGGAGCTGACAAGT | ASEIYNKEYANARICGADKWRKP |
| | | GGAGAAAACCTCTAGCTAAATTTCTGAGGCAGCCCCATTTTATTGTGTGGGATAATAGTGATCTTATC | LAKFLRQPHFIVWDNSDLITHEV |
| | | ACTCATGAAGTAATGGGTGGCTTAAAGAACATATATGCCATTGGTGCTGGTATGGTGGCTGCACTAAC | MGGLKNIYAIGAGMVAALTNESA |
| | | CAATGAGAGTGCAACCAGCAAATCGGTTTACTTTTCACTTTGCACGTCTGAAATGATATACATCACCC | TSKSVYFSLCTSEMIYITHLLAE |
| | | ATCTCCTAGCCGAAGACCCTGAGAAACTTGCTGGACCTTTATTAGCCGATACCTATGTAACACTGCTG | DPEKLAGPLLADTYVTLLKGRNA |
| | | AAAGGTCGTAATGCATGGTATGGGCAGAAGTTAGCTAAGGGTGAGCTGACTCTTGAAATGGGGGACAG | WYGQKLAKGELTLEMGDSIKGKG |
| | | TATCAAGGGCAAAGGGACTATCCAGGGTGTCTCTGCAGTCCATGCATTTTATGAGCTCTTGAGCCAGA | TIQGVSAVHAFYELLSQSSLSVT |
| | | GTAGCTTAAGCGTGACACATCCAGAAGTGAAGAAGCTTGTTGCTCCTGTCGAGCTGTGCCCAATACTC | HPEVKKLVAPVELCPILKTLYKI |
| | | AAAACACTTTATAAAATCCTAATCAAGAGGGAGCTTGCCACTGACTCCATTCTCCAGGCAATACGAGA | LIKRELATDSILQAIRDESMYDP |
| | | TGAATCAATGTATGATCCACGGGAGAGGATTGAGATGTCTCAGCGCCAGTGTCTTTACCGACCATCTC | RERIEMSQRQCLYRPSLLGLPKV |
| | | TTCTTGGCCTACCTAAAGTAGATATTACCCAGGCTTAG SEQ ID NO: 207 | DITQA* SEQ ID NO: 208 |
| 105 | Xa21_Os05g0530400 | ATGGAGAGTTCCAACCTGGGCGGCGGCGGCGGCGGAGGCGGCGGCGGTGGGCCGCCGCCGTTCTTGAT | MESSNLGGGGGGGGGGGPPPFLI |
| | | CAAGACGTACGAGATGGTGGAGGACGCGGCGACCAACCACGTCGTGTCGTGGGGCCCCGGCGGCGCCA | KTYEMVEDAATNHVVSWGPGGAS |
| | | GCTTCGTCGTGTGGAACCCGCTCGACTTCTCCCGTGACCTGCTGCCCAAGTACTTCAAGCACAACAAC | FVVWNPLDFSRDLLPKYFKHNNF |
| | | TTCTCCAGCTTCATCAGGCAGCTCAACACCTACGGTTTTCGAAAAATCGATCCTGAGAGATGGGAGTT | SSFIRQLNTYGFRKIDPERWEFA |
| | | CGCAAACGAGGATTTCATAAGAGGGCACACGCACCTTCTGAAGAACATCCATCGACGCAAGCCCGTGC | NEDFIRGHTHLLKNIHRRKPVHS |
| | | ACAGCCACTCCCTCCAGAACCAGATAAACGGACCACTCGCCGAATCGGAGAGGCGCGAGCTCGAAGAA | HSLQNQINGPLAESERRELEEEI |
| | | GAGATCAACCGGCTCAAGTACGAGAAGAGCATCCTCGTCGCGGATCTCCAGAGGCAGAACCAGCAGCA | NRLKYEKSILVADLQRQNQQQYV |
| | | GTACGTGATCAACTGGCAGATGCAGGCGATGGAAGGCAGGCTGGTGGCGATGGAGCAACGGCAGAAGA | INWQMQAMEGRLVAMEQRQKNIV |
| | | ACATCGTGGCCTCCCTGTGCGAGATTCTGCAGAGACGCGGCGGCGCCGTGTCGAGCTCGCTGCTGGAG | ASLCEILQRRGGAVSSSLLESDH |
| | | TCCGACCATTTCAGCAAGAAGAGGAGGGTCCCGAAGATGGATCTCTTCGTCGACGATTGCGCGGCGGG | FSKKRRVPKMDLFVDDCAAGEEQ |
| | | CGAAGAACAGAAGGTGTTCCAGTTCCAGGGAATTGGGACGGATGCACCGGCCATGCCTCCCGTGCTTC | KVFQFQGIGTDAPAMPPVLPVTN |
| | | CTGTGACCAATGGTGAGGCTTTTGACAGGGTTGAGCTGAGCTTGGTCTCCCTGGAGAAACTCTTCCAG | GEAFDRVELSLVSLEKLFQRAND |
| | | AGAGCAAATGATGCTTGCACAGCTGCTGAAGAAATGTACTCCCATGGTCATGGTGGTACTGAACCCAG | ACTAAEEMYSHGHGGTEPSTAIC |
| | | CACTGCTATATGTCCTGAAGAGATGAACACTGCTCCAATGGAGACAGGCATCGATCTTCAGTTACCAG | PEEMNTAPMETGIDLQLPASLHP |
| | | CTAGCCTCCATCCCAGATCACCCAGCACAGGGAATGCCCATCTCCATTTATCCACTGAACTCACAGAG | RSPSTGNAHLHLSTELTESPGFV |
| | | TCTCCAGGTTTTGTGCAGAGTCCAGAGCTGCCAATGGCAGAGATTCGTGAAGATATCCATGTGACAAG | QSPELPMAEIREDIHVTRYPTQA |
| | | ATACCCAACACAAGCTGATGTAAATTCTGAGATTGCCTCCTCCACTGATACTTCACAAGACGGCACGT | DVNSEIASSTDTSQDGTSETEAS |
| | | CAGAAACTGAAGCTTCGCATGGACCGACCAACGATGTGTTTTGGGAGCGGTTCCTCACAGAGACTCCA | HGPTNDVFWERFLTETPRSCLDE |
| | | CGGTCATGTTTGGATGAGTCAGAAAGACAAGAGAGTCTCAAGGACGATGTAAAAGCAGAATTAGGCTG | SERQESLKDDVKAELGCNGFHHR |
| | | CAATGGCTTCCATCACCGGGAGAAGGTTGATCAGATCACCGAGCAAATGGGGCACCTTGCTTCAGCCG | EKVDQITEQMGHLASAEQTLHT* |
| | | AGCAGACTCTGCATACCTGA SEQ ID NO: 209 | SEQ ID NO: 210 |
| 106 | Xa21_Os05g0542500 | ATGGCTTCCCACCAGGACCAGGCTAGCTACCGCGCCGGCGAGACCAAGGCCCACACCGAGGAGAAGGC | MASHQDQASYRAGETKAHTEEKA |
| | | GGGGCAGGTGATGGGGGCGAGCAAGGAGAAGGCGAGCGAGGCGAAGGACAGGGCGTCGGAGGCGGCGG | GQVMGASKEKASEAKDRASEAAG |
| | | GGCACGCCGCCGGCAAGGGGCAGGACACCAAGGAGGCGACGAAGGAGAGGGCGTCGGAGACGGCGCAG | HAAGKGQDTKEATKERASETAQA |
| | | GCGGCGAAGGACAAGACCTCCGGCACGGCGCAGGCGGCGAGGGAGAGGGCGTCGGAGACGGCGCAGGC | AKDKTSGTAQAARERASETAQAA |
| | | GGCGAAGGACAAGACCTCCGGCACGGCGCAGGCGGCGAGGGACAAGGCCGCCGAGAGCAAGGAACAGA | KDKTSGTAQAARDKAAESKEQTG |
| | | CCGGCGGCTTCCTCGGCGAGAAGACAGAGCAGGCCAAGCAGAAGGCCGCAGAGACCGCCGGCGCAGCC | GFLGEKTEQAKQKAAETAGAAKQ |
| | | AAGCAGAAGACCGCCGAGACGGCGCAGTACACCAAGGACTCCGCCGTCGCCGGCAAGGACAAGACCGG | KTAETAQYTKDSAVAGKDKTGSV |
| | | CAGCGTCCTCCAACAGGCGAGTGAGCAGGTGAAGAGCACGGTGGTCGGCGCCAAGGACGCGGTGATGA | LQQASEQVKSTVVGAKDAVMSTL |
| | | GCACGCTGGGGATGACCGGAGACAAGGCCGGCACCGACGACGGCGCCAACAAAGACACCTCCGCCGCC | GMTGDKAGTDDGANKDTSAATET |
| | | ACGGAGACGACGGCGAGGGATCACTAG SEQ ID NO: 211 | TARDH* SEQ ID NO: 212 |
| 107 | Xa21_OsI_16826 | ATGGATCGGGGTGACCACCACCACCTCCAGCAGCAGCACCAGTTCTTGATGCCACCACCTGCGCCGGT | MDRGDHHHLQQQHQFLMPPPAPV |
| | (Os04g0541700) | GGTGCCGCCGCAGCTGTGCATGCCGGCGATGATGGCGGACGAGCAGTACATGGACCTGGGCGGTGGCG | VPPQLCMPAMMADEQYMDLGGGG |
| | | GGGCGGCGGCGGGGAGGGGCGGCGGCGGGGAGAGGAAGCGGCGGTTCACGGAGGTGCAGATACGGTCG | AAAGRGGGGERKRRFTEVQIRSL |
| | | CTGGAGTCCATGTTCCACGCGCACCACGCCAAGCTGGAGCCCCGCGAGAAGGCGGAGCTGGCGCGCGA | ESMFHAHHAKLEPREKAELAREL |
| | | GCTGGGCCTGCAGCCGCGGCAGGTGGCCATCTGGTTCCAGAACAAGCGCGCGCGGTGGCGCTCCAAGC | GLQPRQVAIWFQNKRARWRSKQL |
| | | AGCTCGAGCACGACTACGCCGCACTCCGCTCCAAGTACGACGCCCTCCACTCCCGCGTCGAGTCCCTC | EHDYAALRSKYDALHSRVESLKQ |
| | | AAGCAAGAGAAGCTCGCTCTCACCGTCCAGTTGCACGAGCTAAGAGTGAGGCTGAGGGAACGGGAGGA | EKLALTVQLHELRVRLREREERS |
| | | GAGGAGCGGCAACGGTGGTGCCGCCACGACGGCAGCAAGCAGCAGCAGCTGCAACGGATCAGGCAGCG | GNGGAATTAASSSSCNGSGSEEV |
| | | AGGAGGTCGACGACGACAAGAGGAACGTCGCCGCGGGGTGCCTGGACCTCGAGCCGCCGGAGAGCTGC | DDDKRNVAAGCLDLEPPESCVLG |
| | | GTGCTCGGCGGCGCGACGTGCGCCACGCCGGCGGACGTGTCGGTGGAGTCGGATCAGTGCGACGACCA | GATCATPADVSVESDQCDDQLDY |
| | | GCTTGACTACGAGGAGGGCTTGTTCCCGGAGTCGTTCTGCGCCACGCCGGAGCTGTGGGAGCCATGGC | EEGLFPESFCATPELWEPWPLVE |
| | | CGCTAGTCGAGTGGAATGCGGTGGCTTGA SEQ ID NO: 213 | WNAVA* SEQ ID NO: 214 |
| 108 | Xa21_Os05g0495300upstream | ATGGCTGTTTGGTTGGTTTTCACTTTCCAGCAGTTGTGCACTCAAAAGGATTTGTCAGTTCCAGATCT | MAVWLVFTFQQLCTQKDLSVPDL |
| | | TGCTGCCGGTTACACTGTTGTTTCCGGAGCCAGGCCTAAGTGTTGGCAGCGGCAGTGCAGAGTAAGAC | AAGYTVVSGARPKCWQRQCRVRQ |
| | | AGAATTCAGATGCAGTGTTGGCGCGGCTAGCAGGCAACGGTGATCCTGTGCGGCAAGGGACGAGCAAA | NSDAVLARLAGNGDPVRQGTSKV |
| | | GTTTGTGGGCAGCAGGATGAAACAATAGTGGCCTTGTGCACTGATAGTATTTTTGAAGGGACTGCACT | CGQQDETIVALCTDSIFEGTALI |
| | | GATATGA SEQ ID NO: 215 | * SEQ ID NO: 216 |
| 109 | Xa21_OsJ_19472 | ATGGCGGAGCCGGCAAGATGGGCTCTCTTGCTCCTCCTTGGCGTCGTACTCCTGGCGCCCGTTACGCT | MAEPARWALLLLLGVVLLAPVTL |
| | (Os05g0552600) | GGCGGTGCGTGTTGAAGATGGCCCGAAGCCACCGACTCATCCGAATAATGGTGATAATGGGAAGCACG | AVRVEDGPKPPTHPNNGDNGKHE |
| | | AGAACCGCGTCACCGCCCCCACCCGTATACTCGCCGCCGCCACCGCCGCGTTCATCTCCTCCACCACC | NRVTAPTRILAAATAAFISSTTG |
| | | GGTTCCCACGTCGCCGCCGCCATCACCGCTGCCATCGCCTCCTCCACCTGTGCCCTCGTCACCGCCAC | SHVAAAITAAIASSTCALVTATT |
| | | CACCAGTGTCATCACCTCCACCACCGGTGCCCTCTTCGCCACCGCCGCCAGTGGTGCCATCGCCTCCT | SVITSTTGALFATAASGAIASST |
| | | CCACCGGTGCTCTCCTCGCCGCCACCACCAGTGGTGGCATCCCCTCCACCACCGGTAGTACCATCACC | GALLAATTSGGIPSTTGSTITSS |
| | | TCCTCCACCAGGAGCCAGCGACGTGGTCTACTGCACGAACAAGACGAGGTACCCCACCTGCACCTCGC | TRSQRRGLLHEQDEVPHLHLAGV |
| | | CGGCGTACTGCCCCAGCAGGTGCCCCAAATCCTGCCACATGGACTGCGCCACCTGCAAGACCACTGCA | LPQQVPQILPHGLRHLQDHCNLP |
| | | ACCTGCCGGGCGCGGTGTGCCAGGACCCGCGGTTCATCGGCGGCGACGGCAACACGTTCTACTTCCAC | GAVCQDPRFIGGDGNTFYFHGRR |
| | | GGCCGCCGTGACCGCGACTTCTGCCTGCTCTCCGACGCAAACCTGCACATCAACGGCCACTTCATCGG | DRDFCLLSDANLHINGHFIGNHV |
| | | CAACCACGTCCCGGGCCTCAAGAGGGACCCGACCTGGGTGCAGGCGATCGCCGTGCAGTTCTCCGGCG | PGLKRDPTWVQAIAVQFSGGHRL |
| | | GCCACCGCCTCTACGTCGGCGCGCGCAGGACGGCCGTGTGGGACGACGACTCCGACCGCCTCGCCGTC | YVGARRTAVWDDDSDRLAVVFDG |
| | | GTGTTCGACGGCGAGACCGTGCAGCTGCAGCGCGTCGCGCACGCCAGGTGGGAGTCGGGTTCCGGCCT | ETVQLQRVAHARWESGSGLSVTR |
| | | GTCCGTGACGCGGACCAAGGCGGCCAACGGCGTCCTCGTGGAGCTCGACGGCGTGTTCAAGATCACCG | TKAANGVLVELDGVFKITANVVP |
| | | CGAACGTGGTGCCCATCACCAAGGAGGACTCGAGGATCCACAGGTACGGGGTCACCGACGACGACTGC | ITKEDSRIHRYGVTDDDCLAHLD |
| | | CTCGCCCACCTCGACCTGGCGTTCAAGTTCTACGCCCTCACCGACGACGTCCACGGCGTGCTGGGCCA | LAFKFYALTDDVHGVLGQTYRSS |
| | | GACGTACAGGAGCAGCTACGTGAACCGCCTCGACGTGTCGGCGAAGATGCCCGTCATGGGAGGCGAGA | YVNRLDVSAKMPVMGGEKQFTSS |
| | | AGCAGTTCACCTCGTCGGGTCTTTTCGCCGCTGACTGCGCCGTCGCGCGGTTCGGGCGCGCCGGCGAT | GLFAADCAVARFGRAGDAGAVAI |
| | | GCCGGCGCCGTTGCCATTGCCTCCGAGGAGCTGGTCGACGTCAAGTGCTCCACCGGCCTCGACGGCGT | ASEELVDVKCSTGLDGVGVVCKK |
| | | CGGGGTGGTGTGCAAGAAGTAG SEQ ID NO: 217 | * SEQ ID NO: 218 |
| 110 | Xa21_Os06g0127100 | ATGGAGTACGACGAGCAGGAGGAGTACGCGACGGTGACGTCGGCGCCGCCGAAGCGGCCGGCGGGGAG | MEYDEQEEYATVTSAPPKRPAGR |
| | | GACCAAGTTCAGGGAGACGAGGCACCCGGTGTACCGCGGCGTGCGGCGGCGGGGGCCCGCGGGGCGGT | TKFRETRHPVYRGVRRRGPAGRW |
| | | GGGTGTGCGAGGTCAGGGAGCCCAACAAGAAGTCCCGCATCTGGCTCGGCACCTTCGCCACCGCCGAG | VCEVREPNKKSRIWLGTFATAEA |
| | | GCCGCCGCGCGCGCCCACGACGTCGCCGCGCTCGCCCTCCGCGGCCGCGGCGCGTGCCTCAACTTCGC | AARAHDVAALALRGRGACLNFAD |
| | | CGACTCCGCCCGCCTCCTCCGCGTCGACCCGGCCACCCTCGCCACCCCCGACGACATCCGCCGCGCCG | SARLLRVDPATLATPDDIRRAAI |
| | | CCATCGAGCTCGCCGAGTCATGCCCGCACGACGCCGCCGCCACCGCCGCCGCTGCCTCCAGCTCTGCC | ELAESCPHDAAATAAAASSSAAA |
| | | GCCGCCGTCGAGGCCGCCGCCGCCGCCGCGCCCGCCATGATGATGCAGTACCAGGACGACATGGCGGC | VEAAAAAAPAMMMQYQDDMAATP |
| | | GACGCCGTCCAGCTACGACTACGCGTACTACGGCAACATGGACTTCGACCAGCCGTCCTACTACTACG | SSYDYAYYGNMDFDQPSYYYDGM |
| | | ACGGGATGGGCGGCACCGCCGGCGGCGGCGGCGAGTACCAGAGCTGGCAGATGGACGGCGACGACGAT | GGTAGGGGEYQSWQMDGDDDGSA |
| | | GGCAGCGCCGGTGGCTACGGCGGCGGCGACGTCACACTCTGGAGCTACTGA | GGYGGGDVTLWSY* |
| | | SEQ ID NO: 219 | SEQ ID NO: 220 |
| 111 | Xa21_Os06g0281800 | ATGAAACTAAGCAACATGACAGCCCTTTTGTCACTTCTGATCTCCATCCTTCTGGTTGCGATAGAGGC | MKLSNMTALLSLLISILLVAIEA |
| | | CAGAGGTTTGGTGGGAGTGGAACGGGTGGAGCTGCCAAATCCTGCATCTATGGTAACAGCATACTGGA | RGLVGVERVELPNPASMVTAYWK |
| | | AGGAGATGCTTCCCCACTCTCCAATGCCGACTGCTATACTCGAGCTTTTGAACCCTCCTACTGATGTT | EMLPHSPMPTAILELLNPPTDVN |
| | | AATCAAGGTGTTTATGGCAATGGCTATGCTCAAGTTTATGGCAACGGATATGATGAAGGCTACCTTAA | QGVYGNGYAQVYGNGYDEGYLNG |
| | | CGGATATAGCCATTCCTATGGTAATGGCTATTCCAATGGCTATTTTCACAAGGCAAATCTCCACTTCT | YSHSYGNGYSNGYFHKANLHFLE |
| | | TAGAAGATGCCTTAAAACCGGGGTCCATAATCACTCCTTACATCACGGGGATAGCTACACGTGCTCCA | DALKPGSIITPYITGIATRAPFL |
| | | TTTCTTCGCCGGGACATTGCGGATTCAATCTCGATGAGCACAAAGAACTTTGCCGACATCCTAAAAAT | RRDIADSISMSTKNFADILKMFS |
| | | GTTTTCGCCTATATCCCTCGTCATGGCCGACGGTATACAGTCGGCATTAGACACATGTGAGCACCACC | PISLVMADGIQSALDTCEHHHPI |
| | | ACCCTATCGAGGGCGAGGAACGGGCGTGTGCCACATCTATCGAGTCGGTGGTTGAGTTTGTTATGTCT | EGEERACATSIESVVEFVMSVLG |
| | | GTGCTCGGGACACATGACCTCCGAGCCTTCTCCCCCGATGTCCCAACAGATGGCGTCATGTCAGGAAA | THDLRAFSPDVPTDGVMSGNKYK |
| | | CAAGTACAAGGTGGCAGCGGTAAGGACAGTTGCGGGCTCAAAGGGGGACACTGTGACGTGCCACACCA | VAAVRTVAGSKGDTVTCHTMRFP |
| | | TGAGGTTCCCGTTCGCTGTGTTCTACTGCCACGCGATCAACCCTACCCGGGTGTACGCGGTGGTGCTG | FAVFYCHAINPTRVYAVVLESEE |
| | | GAGAGCGAGGAGGATGGCAGCGGCACACCGGAGAAGATGGAGGCGCTCGCCGTGTGCCACCTGGACAC | DGSGTPEKMEALAVCHLDTSRFD |
| | | GTCACGTTTCGACCCCAAGACTCCATTGTTCGTCGAGCACAATCTCAGGCCGGGAGATGCGTCGGTGT | PKTPLFVEHNLRPGDASVCHFVS |
| | | GCCACTTCGTTAGCAGGGACAGCGTGATCTGGGCACCTGTAGCTGCTGTGATAACACATGGAGATGAA | RDSVIWAPVAAVITHGDEQVSIA |
| | | CAAGTCTCAATTGCCGAGTAG SEQ ID NO: 221 | E* SEQ ID NO: 222 |
| 112 | Xa21_Os06g0313440 | ATGAAGACTCTGATACAGGAGGCAGTCACAGGCTTATGCACAAGCTCATGTCCTCACCCAAAGAACAT | MKTLIQEAVTGLCTSSCPHPKNM |
| | | GGTGATCGCGGACTTGGGCTGCTCCTCCGGACCAAACGCGCTCACGCTCGTCTCTGCCGCCGTCGACG | VIADLGCSSGPNALTLVSAAVDA |
| | | CCATCCACCGCTACTGCGCGCAGCACGAGCAACTGCCGCCGGAGATGTGCGTGCTCCTGAACGATCTG | IHRYCAQHEQLPPEMCVLLNDLP |
| | | CCTGGCAACGATTTCAACACCGTGGCGAAGAGCTTGGACACACTGAAGCACAGTGGTGGTGATGCTCT | GNDFNTVAKSLDTLKHSGGDALA |
| | | CGCTCAACCTGCTGTTGTGATCACCGGTATGGTACCTGGGTCGTTCTACGAGAGGCTATTCGCTCGTG | QPAVVITGMVPGSFYERLFARGS |
| | | GCTCCTTGCATTTGGTTTGCTCGGCTAACAGCTTGCATTGGTTATCCGAGGCACCTGAAGATCTCAAG | LHLVCSANSLHWLSEAPEDLKKS |
| | | AAGAGTAGAATCCCGATGCATGATAGTGATGAACAGTTGAGATCATCAAGGCATCAAATTGTCGCGGA | RIPMHDSDEQLRSSRHQIVADSY |
| | | TTCATATGCTCGGCAGTTTAGGAAGGATTTCATGCGATTCTTGAGCTTGAGGGCACAGGAGATTGTCC | ARQFRKDFMRFLSLRAQEIVPGG |
| | | CTGGAGGCCGAATGGTTGTCTCACTGTTGGTCAAGCGCTCGGACAAACCTGACACTGAGTTAATTCAA | RMVVSLLVKRSDKPDTELIQPWT |
| | | CCATGGACGCCGGCGGTGACGGCTTTAAGTGACATGGCATTAAGGGGTGTCATCAGCAAAGAAAAGCT | PAVTALSDMALRGVISKEKLDSF |
| | | TGACTCCTTCTACATTCCCTTGTGCTGCCCTATGGACAGTGAAGTTAACAAGATCATAGAAGAGGAGG | YIPLCCPMDSEVNKIIEEEGSFE |
| | | GTTCATTTGAGATCAACAAGATGGTGATGCACGATCCCTATGGCGGCACGGGCAGAGCCTTGCTCGAT | INKMVMHDPYGGTGRALLDLKMV |
| | | CTGAAGATGGTAGCCTTGCGCGTAAGAGCTGTATTTGAGCCAATAATAGTGCAGCATTTTGCAGCGTC | ALRVRAVFEPIIVQHFAASNEIM |
| | | AAATGAAATCATGGACGACTTCGTCAGAGCAGTGGAGCGGCACTTGATCAGTTCTGGGGCTCTGGAAG | DDFVRAVERHLISSGALEARLSG |
| | | CTAGGCTGTCCGGCCAACACTCGTTTGCCTTCTTGTGTTTGTCTCTCACTAGAGCGATGTGA | QHSFAFLCLSLTRAM* |
| | | SEQ ID NO: 223 | SEQ ID NO: 224 |
| 113 | Xa21_OsI_22710 | ATGGCTTCTAGGTCTCTTGTGTTGATGTTTGTGTTGATGGTTTCTCTTGTCATCGTCTCTCAGGGTGT | MASRSLVLMFVLMVSLVIVSQGV |
| | (Os06g0313500) | CCTTGCTGCAAGGGAGCTTGCAGAGAAAACCAAAGTGGATGTAGATGGAATGAATGTCGACCTTCCTA | LAARELAEKTKVDVDGMNVDLPK |
| | | AAGGCCGCAAAGGTGCAGTTGCAGTCTCAGGGTACGGTGGTGGTTGGTCAGGGTCATACGGTGGCAGA | GRKGAVAVSGYGGGWSGSYGGRH |
| | | CACTATCCATGA SEQ ID NO: 225 | YP* SEQ ID NO: 226 |
| 114 | Xa21_Os06g0318600 | ATGCCGACGGCTGCGTCGGAGCGCGACGGCGGCGGCCGTGCCGCGCTGGGGAAGGCGGCGGCGGGGCT | MPTAASERDGGGRAALGKAAAGL |
| | | CGCCGCGGCGGCCGTGGTGTCGCTGACCGGGCTCGCCGCGGAGCCCCTCTCGCCGCCGCCGCCGGCGC | AAAAVVSLTGLAAEPLSPPPPAR |
| | | GGGCCGAGTCGCTCACCGTCGCGTTCCCTGTCTCCAAGGCCCGTGAGGTGAACCGGGTGCAGAGGACG | AESLTVAFPVSKAREVNRVQRTL |
| | | CTGGTGGAGGCGTGGGGGCTGATCCGTGAGACCTTCGTGGATCCCACCTTCAATCACCAAGATTGGGA | VEAWGLIRETFVDPTFNHQDWDM |
| | | CATGAGACTGCAGCAGACCATGGTGGAGATGTTCCCTCTGAAATCGGAGGATGCCGCCTATGGTAAGA | RLQQTMVEMFPLKSEDAAYGKIS |
| | | TCAGTGGGATGCTGTCCACACTCGGCGATCCGTTCACCAAGATCATCAGCCCCAAGGAATATCAGAGT | GMLSTLGDPFTKIISPKEYQSFR |
| | | TTCAGGATTGGAAGCGATGGGAGTGTCCAAGGGGTTGGGGTGTTCATAAACAAGGAGCCTAGCTCTGG | IGSDGSVQGVGVFINKEPSSGRL |
| | | ACGCTTGCTTGTTATGGACTGCATTGAAGGTGGCCCAGCAGATCGAGCAGGCCTGCATGGAGGCGATG | LVMDCIEGGPADRAGLHGGDELV |
| | | AACTAGTTGAGATCGATGGGAAGAGTGTTTCTGGGTTGGATGGAGAAGCTGCAGCTCAGAGACTTAGA | EIDGKSVSGLDGEAAAQRLRGRV |
| | | GGTCGTGTTGGAACAACTGTGAAAGTGAAAGTGTTGGATGGCACTGAAAACGAAAGGAATGGTAGGAT | GTTVKVKVLDGTENERNGRIRQK |
| | | AAGACAAAAGGAGGTCCAGCTATCTCGTGAGGTTATCAATCTTTCACCTCTATCAACAGCAATTATCT | EVQLSREVINLSPLSTAIISHRS |
| | | CTCATAGGTCGGACGATGGCCGTGAGTGCAAAACTGGGTATGTTAGGCTAGCTGCATTCTCTCAGACT | DDGRECKTGYVRLAAFSQTAAAE |
| | | GCTGCAGCTGAAATGGAAAGTGCCATTAAGAAGATGGAGGATGAGGGTGTCCAGTCATATATTTTAGA | MESAIKKMEDEGVQSYILDLRNN |
| | | TCTGCGAAATAATCCTGGTGGTCTAGTAAAAGCAGGTCTTGACGTGGCTCAAATGTGGTTGGATGGAA | PGGLVKAGLDVAQMWLDGNETLV |
| | | ATGAAACTCTTGTCAACACTGTTGACCGTGAGGGAAATGTCCTACCAATAAATATGGCCCGGGGCCAT | NTVDREGNVLPINMARGHSLTHD |
| | | TCTTTAACACATGATCCCCTTGTCGTACTTGTCAATGAAGGAAGTGCAAGTGCAAGTGAAATCTTGGC | PLVVLVNEGSASASEILAGALHD |
| | | AGGAGCATTACATGACAATGGTCGTGCTATTTTGGTCGGCCACAGAACTTTTGGAAAAGGAAAAATAC | NGRAILVGHRTFGKGKIQSVTEL |
| | | AGAGTGTGACTGAATTGGATGATGGATCTGCTCTGTTTATCACGGTCGCAAAGTATCTCTCTCCAGCA | DDGSALFITVAKYLSPALHEIDQ |
| | | CTGCATGAAATCGACCAAGTAGGCATCCAACCTGACATACAATGCACCCCTGAAATGTTATCTTTGCC | VGIQPDIQCTPEMLSLPRAPSLK |
| | | AAGAGCACCTTCGCTAAAAGAGGACGACAAAGCCACAAATCTGGAGATGGATTCATGTATCATGGTGG | EDDKATNLEMDSCIMVAEQALEI |
| | | CAGAGCAAGCATTGGAAATTGAGAAATCAAAGGGATCTGCTTCGTAG | EKSKGSAS* |
| | | SEQ ID NO: 227 | SEQ ID NO: 228 |
| 115 | Xa21_OsI_23134 | ATGGCGTCCAAGCGGATCCTCAAGGAGCTCAAGGACCTGCAGAAGGATCCCCCAACCTCCTGCAGCGC | MASKRILKELKDLQKDPPTSCSA |
| | (Os06g0506600) | TGGCCCTGTGGGAGAAGATATGTTCCACTGGCAAGCTACGATTATGGGTCCAGCAGATAGTCCATATG | GPVGEDMFHWQATIMGPADSPYA |
| | | CAGGTGGCGTCTTCTTGGTTTCTATTCACTTCCCTCCAGACTATCCGTTCAAACCGCCCAAGGTTGCA | GGVFLVSIHFPPDYPFKPPKVAF |
| | | TTTAAGACAAAGGTTTTCCACCCAAACATCAACAGTAACGGAAGCATCTGCCTTGATATCCTGAAGGA | KTKVFHPNINSNGSICLDILKEQ |
| | | ACAGTGGAGCCCTGCATTGACAGTGTCAAAGGTACTCCTCTCAATTTGTTCTCTACTGACGGACCCAA | WSPALTVSKVLLSICSLLTDPNP |
| | | ACCCAGACGACCCGCTAGTTCCGGAGATTGCGCACATGTACAAGACTGATCGGGCCAAATATGAATCA | DDPLVPEIAHMYKTDRAKYESTA |
| | | ACTGCGAGGGGCTGGACCCAGAAATATGCAATGGGCTGA | RGWTQKYAMG* |
| | | SEQ ID NO: 229 | SEQ ID NO: 230 |
| 116 | Xa21_OsJ_22168 | ATGGATTCGTGGATTGAGCAGACTTCCCTGAGCTTGGACCTTAACGTCGGCTTGCCGTCGACGGCGAG | MDSWIEQTSLSLDLNVGLPSTAR |
| | (Os06g0649000) | GAGATCATCGGCTCCGGCGGCGCCGATTAAGGTTCTCGTGGAGGAGAACTTCTTGTCCGTCAAGAAGG | RSSAPAAPIKVLVEENFLSVKKD |
| | | ATCACGAGGTTGAGGCGCTGGAGGCGGAGCTCCGGCGAGCGAGCGAGGAGAACAAGAAGCTGACCGAG | HEVEALEAELRRASEENKKLTEM |
| | | ATGCTTCGGGCGGTGGTGGCCAAGTACACCGAGCTGCAGGGACAGGTCAACGACATGATGTCGGCGGC | LRAVVAKYTELQGQVNDMMSAAT |
| | | GACGGCGGCGGCGAACGCCGGGAACCACCACTCGTCCACGTCGGAGGGCGGCTCGATCTCGCCGTCGA | AAANAGNHHSSTSEGGSISPSRK |
| | | GGAAGCGGATCCGTAGCGTCGACAGCCTCGATGACGCCGCCCCCCACCACCACCCCCACCGCAAGCCG | RIRSVDSLDDAAPHHHPHRKPSP |
| | | TCCCCGCCGTTCGTCGCCGCCGCCGCCGCCGCAGCCTACACCTCCCCCGACCAGATGGAGTGCACGTC | PFVAAAAAAAYTSPDQMECTSAS |
| | | GGCGTCCGCCGCCGCCGCCAAGCGCGTCGTCCGCGAGGACTGCAAGCCCAAGGTGTCCAAGCGCTTCG | AAAAKRVVREDCKPKVSKRFVHA |
| | | TCCACGCCGACCCCTCCGACCTCAGCCTCGTGGTGAAGGATGGGTATCAATGGCGGAAGTACGGGCAG | DPSDLSLVVKDGYQWRKYGQKVT |
| | | AAGGTGACGAAGGACAACCCGTGCCCGCGGGCCTACTTCAGGTGCTCGTTCGCGCCGGCGTGCCCGGT | KDNPCPRAYFRCSFAPACPVKKK |
| | | GAAGAAGAAGGTGCAGCGCAGCGCCGACGACAACACCGTCCTCGTCGCCACGTACGAGGGCGAGCACA | VQRSADDNTVLVATYEGEHNHAQ |
| | | ACCACGCCCAGCCGCCGCACCACGACGCCGCCGGCAGCAAGACCGCCGCCGCCGCCAAGCACTCACAG | PPHHDAAGSKTAAAAKHSQHQPP |
| | | CACCAGCCGCCACCGAGCGCCGCCGCCGCCGTCGTCCGGCAGCAGCAAGAGCAGGCGGCGGCGGCCGG | PSAAAAVVRQQQEQAAAAGPSTE |
| | | GCCGTCGACGGAGGTGGCGGCGAGGAAGAACCTGGCCGAGCAGATGGCGGCGACGCTGACGAGGGACC | VAARKNLAEQMAATLTRDPGFKA |
| | | CCGGGTTCAAGGCGGCGCTCGTCACGGCGCTCTCCGGCCGGATCCTCGAGCTCTCGCCGACCAAGAAC | ALVTALSGRILELSPTKN* |
| | | TAA SEQ ID NO: 231 | SEQ ID NO: 232 |
| 117 | Xa21_Os07g0114300 | ATGGGCGGCGGCAATGGGCAGAAGTCGAAGATGGCGAGGGAGAGGAACATGGAGAAGAACAAGGGCGC | MGGGNGQKSKMARERNMEKNKGA |
| | | CAAGGGGAGCCAGCTTGAGGCCAACAAGAAGGCCATGAACATCCAGTGCAAGATATGCATGCAGACTT | KGSQLEANKKAMNIQCKICMQTF |
| | | TCATCTGCACCACCTCTGAGACCAAGTGCAAAGAGCATGCTGAGGCGAAGCATCCGAAGAGCGACCTC | ICTTSETKCKEHAEAKHPKSDLT |
| | | ACCGCGTGCTTCCCTCACCTCAAGAAATAA | ACFPHLKK* |
| | | SEQ ID NO: 233 | SEQ ID NO: 234 |
| 118 | Xa21_OsJ_22964 | ATGTCCTTTCTGCCACTCATCTTCTTCCTTGGCCTTAGCCTAGCATCCATCACCAACGGTGACGATAA | MSFLPLIFFLGLSLASITNGDDN |
| | (Os07g0129900) | CCACCAGTTCGTCTACAATGGCTTCACTAGTGCTAACAACCTCTCCCTTGACGGCGTGGCCATGGTGA | HQFVYNGFTSANNLSLDGVAMVT |
| | | CTCCTGATGGCCTCGTCGAGCTCACCAACGATGGAATCCGGATGAAAGGCCATGCTTTCTACCCGTCT | PDGLVELTNDGIRMKGHAFYPSP |
| | | CCTCTGCACTTCCGCCAGTCTCCTAATGGCATGGTGCGATCTTTCTCTGTCTTCTTCGTGTTCGGCAT | LHFRQSPNGMVRSFSVFFVFGIV |
| | | CGTCCCTACCTTCTCTGACCTGAACAGTGGCCATGGCATCGCCTTCGTCATTGCACCAAGCAAGAATT | PTFSDLNSGHGIAFVIAPSKNFS |
| | | TCTCAGATGCTATCGCGGCACAATACTTTGGGCTCTTCAATAGTGAGACCGATGGCAATGATAGAGGC | DAIAAQYFGLFNSETDGNDRGHI |
| | | CACATCTTTGCAATTGAGCTTGACACCGTTAAGAACACAGAGTTTGGGGACATGAATGATAATCATGT | FAIELDTVKNTEFGDMNDNHVGI |
| | | TGGGATCGATATCAATAATCTCACCTCTTTGCGATCCTACCCCGCTGGATACTATGAAGAGAGTGGAA | DINNLTSLRSYPAGYYEESGRFK |
| | | GGTTCAAAAACCTGACCCTTGCATCCATGGAGGCTATACAAGTGTGGGTTGATTATGACAGAGAAGCT | NLTLASMEAIQVWVDYDREATRI |
| | | ACTCGGATCAACGTGACCATGGCTCCTCTTGCCATGGCCAAACCTGTGAGGCCATTGTTGTCTGCTAC | NVTMAPLAMAKPVRPLLSATYNL |
| | | CTACAACCTCTCAGGATTGCTCATGGAGCGTTCATACATCGGCTTCTCTTCCTCGACAGGCGCAACTA | SGLLMERSYIGFSSSTGATSARH |
| | | GTGCACGACACTACCTTCTTGGCTGGAGCTTCAGTATGAATGGAGGAACTGCGCCGGCCATCGACATT | YLLGWSFSMNGGTAPAIDIAKLP |
| | | GCCAAGCTGCCAAAGCTACCTCGTGTTGGTCCTAAGTCTGATCCATCCAATCTGTTGCAAATCATATT | KLPRVGPKSDPSNLLQIILPVAT |
| | | GCCGGTGGCAACCGCAGCATTCCTCGTGGCTGCGGGTGCTACTGTTTTTCTCCTTGTGCGAAGGCGTA | AAFLVAAGATVFLLVRRRMRYTE |
| | | TGAGGTACACTGAGTTGCGAGAAGATTGGGAGATCGATTTTGGGCCACACCGGTTCGCATATAAGGAT | LREDWEIDFGPHRFAYKDLFHAT |
| | | TTGTTCCATGCCACGGAAGGGTTCCAGAACAAGAATTTGCTAGGCACAGGAGGTGCTGGGAGGGTATA | EGFQNKNLLGTGGAGRVYKGMLL |
| | | CAAGGGGATGCTTCTAGGGTCCAAACAAGAGATCGCAGTGAAAAAGATACCACAAAATTCGAAGGAAA | GSKQEIAVKKIPQNSKESMKQFV |
| | | GCATGAAACAGTTTGTAGCGGAGATTATTAGCATAGGCCGCCTTGACCACCGCAATCTTGTTCACCTC | AEIISIGRLDHRNLVHLLGYSRR |
| | | CTCGGTTATTCCCGACGTAAAGGTGAATTGATTTTAGTGTACGAGTATATGTCAAATGGAAGCTTGGA | KGELILVYEYMSNGSLEKYLYGQ |
| | | AAAGTACTTGTATGGTCAAGATGGTAGGTGCACTTTGGATTGGGGTCAACGGTTTCAAATCATCAAAG | DGRCTLDWGQRFQIIKGIASGLL |
| | | GGATCGCGTCTGGGTTGCTTTACCTCCATGAAGAATGGGAGAAAGTAGTGATTCATCGAGATGTGAAG | YLHEEWEKVVIHRDVKPSNILLD |
| | | CCAAGTAACATACTCCTCGACAACAAGATGAATGCAAAGATAGGTGACTTTGGCCTCTCAAGGTTGCA | NKMNAKIGDFGLSRLHDHGANPQ |
| | | CGATCATGGAGCCAATCCACAAACTACACACGTTGTTGGCACCATAGGGTACTTAGCTCCAGAAATAG | TTHVVGTIGYLAPEIALTGKVTP |
| | | CATTGACCGGCAAGGTGACTCCACTCGCCGACGTATTTTCCTTCGGCATATTAGCCCTAGAGATTACA | LADVFSFGILALEITCGQKPMKQ |
| | | TGTGGGCAGAAACCTATGAAGCAAAATGCACAAGGCATCCAACAAACATTGGTTGGTTGGGTGCTAGA | NAQGIQQTLVGWVLECWKKGSVV |
| | | ATGTTGGAAAAAAGGATCAGTTGTTGATGCAGTTGATGCCAACCTCCAAGCTGACTATGATATTGCTG | DAVDANLQADYDIAEASLVLKLG |
| | | AAGCAAGTTTAGTGCTAAAATTAGGATTGCTATGCTCACATCCATCTGAACACTCAAGACCGAATATG | LLCSHPSEHSRPNMRQVTQYLNG |
| | | AGACAAGTGACGCAGTATCTCAATGGTGACATGCCACTACCAGAAACTATTTCAATTCAAACCCAGGA | DMPLPETISIQTQDLACFT* |
| | | TTTGGCTTGTTTCACTTGA SEQ ID NO: 235 | SEQ ID NO: 236 |
| 119 | Xa21_OsJ_23939 | ATGGCCTACGACCAGGCCGCGCTCTCGGCGCGGGGCGCGGCCGCGGCGCTCAACTTCCCCGTGGAACG | MAYDQAALSARGAAAALNFPVER |
| | (Os07g0410300) | CGTGCGCGAGTCGCTCCGCGCGCTCGCGCTCGGCGCGGCCGGCGGCTCGCCCGTGCTGGCGCTGAAGG | VRESLRALALGAAGGSPVLALKG |
| | | GGCGGCACTCCAAGCGAAAGCGGCGGAAGAGATCAGAGCTGGCCGGTGCCACGGCGACGGCGAACAAG | RHSKRKRRKRSELAGATATANKT |
| | | ACGACGACGACGACGACGTCCGCCACGACCGGCGGGGAGCACAAGCAGATCGTCCTCGAGCTGGAGGA | TTTTTSATTGGEHKQIVLELEDL |
| | | CCTCGGCGCCGACTACCTAGAGGAGCTCCTCTGGATGTCCGAGCAAACTAGCCATTGA | GADYLEELLWMSEQTSH* |
| | | SEQ ID NO: 237 | SEQ ID NO: 238 |
| 120 | Xa21_Os07g0529800 | ATGTCTGATCTCGACATTCAGATCCCAACTGCCTTCGATCCCTTTGCTGAGGCCAATGCTGGAGACTC | MSDLDIQIPTAFDPFAEANAGDS |
| | | TGGTGCGGCTGCAGGATCAAAGGACTACGTTCATGTACGCATCCAGCAGCGTAATGGCCGTAAGAGCC | GAAAGSKDYVHVRIQQRNGRKSL |
| | | TGACCACTGTCCAGGGATTGAAGAAGGAATTCAGCTACAACAAGATCCTCAAAGATCTCAAGAAAGAG | TTVQGLKKEFSYNKILKDLKKEF |
| | | TTCTGCTGCAATGGTACTGTTGTCCAGGACCCAGAGCTTGGCCAGGTCATTCAACTTCAGGGTGATCA | CCNGTVVQDPELGQVIQLQGDQR |
| | | GAGGAAGAACGTATCAAATTTTCTTGTTCAGGCCGGCATTGTGAAGAAGGAACACATCAAGATTCATG | KNVSNFLVQAGIVKKEHIKIHGF |
| | | GTTTCTGA SEQ ID NO: 239 | * SEQ ID NO: 240 |
| 121 | Xa21_Os07g0545800 | ATGGACTTGCACCAGTTATTAAAGTACAGATTGACTGGCGCTAACGTTGTGTACGAAATTCCTACAGA | MDLHQLLKYRLTGANVVYEIPTE |
| | | GAACAACTTGCAAAACTCTCCCTGGCAAGCTAACCCACTGAAGTACGAGTTCAGCGATTCCCCATACA | NNLQNSPWQANPLKYEFSDSPYT |
| | | CCCCTCTCTCTTCCCAATTTGAGTGTGACAATTTGTCTGCTCTTACCAACACTCCAGATAACCAGAGC | PLSSQFECDNLSALTNTPDNQSS |
| | | TCTACAGAAACCATTTCAGCCCAACCAATCTCCCCATTGGAAGCAGACAGCTCATATAGACAGGCGGG | TETISAQPISPLEADSSYRQAGI |
| | | TATTCTTCTCCAGGAGAACATTCAAGTGGGAGCTGATCCGTTGTATGCTACATCAAGACATAATATGC | LLQENIQVGADPLYATSRHNMQH |
| | | AACACGCCTTACGGGAGATTGAGACTGTTCTGATGGCACCTGATACAGATGATGCAACAACTAGCACC | ALREIETVLMAPDTDDATTSTKH |
| | | AAGCATGAGTTTGAGGAAATCAAGCCTGCTCAGCTTGTGAGGCAGCGGTCGAGAACATGGAGTCATGA | EFEEIKPAQLVRQRSRTWSHESR |
| | | ATCACGGCAGCCGTTACCTGGAGTTGGTCGGTCACAGTTTGCATCTGGTGGATACCCCACAGCAAGCT | QPLPGVGRSQFASGGYPTASYEF |
| | | ATGAATTTCGTCCAGAGAAACGGCAAAGGGAGTTAAGGGAAGACCCTCAGATAATTGTGAAGCAGCTA | RPEKRQRELREDPQIIVKQLLTR |
| | | TTAACCAGGTGTGCTGAGGCTCTGAGTGAGGACAGGACAGAGGAGTTCCATAAGCTTGTTCAGGAGGC | CAEALSEDRTEEFHKLVQEARGV |
| | | TCGTGGAGTGGTCTCAATCAACGGGGAACCAATCCAACGTCTAGGTGCTTACCTACTGGAGGGTTTGG | VSINGEPIQRLGAYLLEGLVARH |
| | | TTGCTAGACATGGAAACTCTGGCACAAACATCTACCGTGCTCTGAAGTGCCGTGAGCCAGAGAGCAAG | GNSGTNIYRALKCREPESKELLS |
| | | GAGCTCCTGTCCTACATGAGAATTCTATACAATATCTGCCCTTACTTCAAGTTTGGCTATATGGCAGC | YMRILYNICPYFKFGYMAANGAI |
| | | CAATGGGGCGATTGCAGAAGCATTGAGAACTGAGAACAATATCCACATAATTGATTTTCAGATTGCTC | AEALRTENNIHIIDFQIAQGTQW |
| | | AAGGGACTCAATGGATCACACTGATACAAGCATTAGCTGCAAGGCCTGGTGGTCCTCCTCGTGTGCGG | ITLIQALAARPGGPPRVRITGID |
| | | ATCACCGGGATAGATGACCCAGTGTCAGAGTATGCTCGTGGTGAAGGTCTTGACATTGTGGGGAAAAT | DPVSEYARGEGLDIVGKMLKSMS |
| | | GTTGAAAAGCATGTCTGAAGAATTCAAAATACCTCTGGAGTTTACGCCTCTGTCTGTCTATGCCACAC | EEFKIPLEFTPLSVYATQVTKEM |
| | | AAGTCACGAAAGAGATGCTTGAGATCAGGCCAGGTGAAGCACTGGCTGTAAACTTCACACTCCAGCTA | LEIRPGEALAVNFTLQLHHTPDE |
| | | CACCACACCCCGGACGAGAGCGTGGATGTCAACAACCCACGCGATGGTCTGCTCCGGATGGTGAAAGG | SVDVNNPRDGLLRMVKGLSPKVT |
| | | GCTGTCCCCGAAGGTGACTACTTTGGTAGAGCAGGAGTCACACACCAACACAACGCCCTTCTTGATGA | TLVEQESHTNTTPFLMRFGETME |
| | | GGTTTGGGGAGACCATGGAGTACTACTCCGCCATGTTCGAGTCGATCGACGCCAACCTGCCGCGGGAC | YYSAMFESIDANLPRDNKERISV |
| | | AACAAGGAGAGGATCAGCGTGGAGCAGCACTGCCTCGCCAAGGACATCGTCAACATCATCGCCTGCGA | EQHCLAKDIVNIIACEGKDRVER |
| | | GGGGAAGGACAGGGTGGAGAGGCATGAGCTGCTTGGCAAGTGGAAGTCGAGGCTGACCATGGCCGGCT | HELLGKWKSRLTMAGFRPYPLSS |
| | | TCAGGCCTTACCCGCTGAGCTCCTACGTCAACTCGGTGATAAGGAAGCTTCTCGCCTGCTACTCCGAT | YVNSVIRKLLACYSDKYTLDEKD |
| | | AAATACACACTGGATGAGAAGGACGGCGCGATGCTTCTCGGCTGGAGGAGCAGAAAACTGATATCTGC | GAMLLGWRSRKLISASAWH* |
| | | TTCTGCGTGGCACTGA SEQ ID NO: 241 | SEQ ID NO: 242 |
| 122 | Xa21_Os07g0581000 | ATGGAGGCGGAGAAGAAGCCGCCGGCGGTGTCCGACGTCGGGGCGTGGGCGATGAACGTCGTCAGCTC | MEAEKKPPAVSDVGAWAMNVVSS |
| | | CGTCGGCATCATCATGGCAAACAAGCAGCTCATGTCCTCCTCCGGCTACGCCTTCTCCTTCGCCACGA | VGIIMANKQLMSSSGYAFSFATT |
| | | CGCTGACCGGATTCCACTTCACCGTCACGGCGCTCGTCGGATGGATCTCCAACGCCACCGGCTACTCC | LTGFHFTVTALVGWISNATGYSV |
| | | GTATCCAAGCACGTCCCGCTCTGGGAGCTCGTCTGGTTCTCCCTCGTCGCCAACACGTCCATCACCGG | SKHVPLWELVWFSLVANTSITGM |
| | | GATGAACCTTAGTCTCATGCTCAACTCCGTCGGTTTCTATCAGATCTCGAAATTGAGCATGATCCCGG | NLSLMLNSVGFYQISKLSMIPVV |
| | | TGGTTTGCTTGATGGAATGGGTGCTCAACAGCAAGCACTACACCACCAAGGTTATATCGGCCGTGGTC | CLMEWVLNSKHYTTKVISAVVVV |
| | | GTCGTGGCGGCGGGTGTTGGGATTTGCACGGTCACGGATGTGGAGGTCAATGCCAAGGGATTCATCTG | AAGVGICTVTDVEVNAKGFICAC |
| | | CGCTTGCGTGGCTGTCTTCTGCACGTCGCTTCAACAGATTACAATTGGCTCCTTTCAGAAGAAGTACA | VAVFCTSLQQITIGSFQKKYNIG |
| | | ACATAGGGTCATTTGAACTTCTCAGCAAAACTGCACCAATACAGGCTGTGTCTCTTATTATACTTGGT | SFELLSKTAPIQAVSLIILGPFA |
| | | CCCTTTGCTGACTATTACCTCAATGGGCGATGGTTATTAAACTACAACTTCTCAACTGGGGCAACTTT | DYYLNGRWLLNYNFSTGATFFIL |
| | | CTTCATATTGCTTTCTTGCTCCTTGGCTGTCTTCTGCAACATGAGCCAGTACCTCTGCATCGGCCGGT | LSCSLAVFCNMSQYLCIGRFSAT |
| | | TCTCTGCAACTTCGTTCCAGGTCCTGGGCCACATGAAGACCGTGTGCGTGCTGATTCTTGGCTGGATC | SFQVLGHMKTVCVLILGWILFDS |
| | | CTGTTCGACTCGGCCCTCACCGTGAAGAACATCCTCGGGATGCTGCTCGCCGTGATGGGCATGGTGGT | ALTVKNILGMLLAVMGMVVYSWA |
| | | CTACAGCTGGGCCGTGGAGACCGAGAAGAAGGCCTCCGCCCCAATCCCCCGGAACAAGAGCGACATGC | VETEKKASAPIPRNKSDMLDDSE |
| | | TGGACGACTCCGAGGACGTTCCCCTCAAGGCCAGGGTGAGCGGCCTCCCCTCGTCCGACCTCGAGGAA | DVPLKARVSGLPSSDLEEGEMKS |
| | | GGCGAGATGAAGAGCTAG SEQ ID NO: 243 | * SEQ ID NO: 244 |
| 123 | Xa21_Os07g0583600 | ATGGCTGATACTCCAACTTCCCGAATGATTCATCCCTTCAACAATATACCGAGCCAAAACCTGAAGCA | MADTPTSRMIHPFNNIPSQNLKQ |
| | | GTTCCAGTATTCTGATAATCCTCAGCACCCTTGCCACCCTTATAGGGCACCTTCAGACACCCACGTTG | FQYSDNPQHPCHPYRAPSDTHVV |
| | | TGCCACATCATTATGGCCTAAAGTCACATTCACCGGATGCTGGTTATGAAAGCCAGGCTACTCCTAAC | PHHYGLKSHSPDAGYESQATPNK |
| | | AAGTACACATTGGACTCCTCTGAAGGTGCTGGTTGTATGAGACATGATTCTCCTTCCAGTCAAAGTTT | YTLDSSEGAGCMRHDSPSSQSFT |
| | | CACAACCAGAAGTGGTAGCCCTCTATCTCAGGAAGACAGCCACTCTGACTCGACTGATGGATCTCCTG | TRSGSPLSQEDSHSDSTDGSPVG |
| | | TAGGCGCCTCCTGTGTCACTGAGGATCCTAATGATCTGAAGCAAAAACTGAAGGATCTCGAGGCCGTT | ASCVTEDPNDLKQKLKDLEAVML |
| | | ATGCTTGGGCCAGACTCGGAGATAGTCAACAGCCTCGAGAATTCTGTGGCAAACCAACTTTCCTTGGA | GPDSEIVNSLENSVANQLSLEPE |
| | | GCCGGAGAAGTGGGTGCGCATGATGGGCATTCCCAGAGGCAACTTGAAAGAGCTACTGATTGCCTGTG | KWVRMMGIPRGNLKELLIACARA |
| | | CTAGAGCTGTGGAAGAGAAGAATAGCATTGCTATTGATATGATGATTCCAGAGCTGAGAAAAATGGTT | VEEKNSIAIDMMIPELRKMVSVS |
| | | TCAGTATCTGGTGAGCCACTTGAGAGGTTGGGAGCCTACATGGTAGAAGGGCTTGTTGCCAGGCTTGC | GEPLERLGAYMVEGLVARLASSG |
| | | CTCCTCTGGCAATTCAATCTACAAAGCTTTGAAATGCAAGGAACCAAAGAGCTCTGACCTTCTGTCTT | NSIYKALKCKEPKSSDLLSYMHF |
| | | ACATGCACTTCCTGTATGAGGCCTGCCCCTACTTCAAGTTCGGCTATATGTCGGCGAATGGTGCTATT | LYEACPYFKFGYMSANGAIAEAV |
| | | GCAGAGGCTGTCAAGGGAGAAGACAGGATTCATATCATCGACTTCCATATCTCTCAAGGGGCTCAGTG | KGEDRIHIIDFHISQGAQWISLL |
| | | GATCTCTCTCCTTCAGGCCCTTGCAGCCAGGCCTGGTGGACCACCAACTGTAAGGATCACTGGTATTG | QALAARPGGPPTVRITGIDDSVS |
| | | ATGACTCAGTGTCAGCTTACGCACGAGGCGGCGGGCTAGAGCTGGTCGGAAGGAGGCTGTCCCACATC | AYARGGGLELVGRRLSHIAGLCK |
| | | GCCGGCCTGTGCAAGGTGCCCTTTGAATTCCACCCGCTTGCTATCTCCGGCAGCAAGGTGGAGGCGGC | VPFEFHPLAISGSKVEAAHLGVI |
| | | GCATCTCGGAGTCATCCCCGGGGAAGCCCTCGCCGTGAACTTCACCCTGGAGCTGCACCACATTCCAG | PGEALAVNFTLELHHIPDESVST |
| | | ACGAATCGGTGAGCACGGCGAACCACCGTGATCGCCTCCTGAGGATGGTGAAGAGCCTGTCGCCGAAG | ANHRDRLLRMVKSLSPKVLTLVE |
| | | GTGCTCACCCTGGTGGAGATGGAGTCCAACACGAACACCGCGCCGTTCCCGCAGAGGTTCGCGGAGAC | MESNTNTAPFPQRFAETLDYYTA |
| | | GCTGGACTACTACACCGCCATCTTCGAGTCCATCGACCTGACGCTGCCGAGGGGCGACAGGGAGAGGA | IFESIDLTLPRGDRERINMEQHC |
| | | TCAACATGGAGCAGCACTGCCTCGCGAGGGAGATCGTCAACCTCATCGCGTGCGAGGGGGAGGAGAGG | LAREIVNLIACEGEERAERYEPF |
| | | GCGGAGCGGTACGAGCCCTTCGGCAAGTGGAAGGCGCGCCTCACCATGGCCGGGTTCAGGCCGTCGCC | GKWKARLTMAGFRPSPLSSLVNA |
| | | GCTCAGCTCGCTGGTGAACGCCACCATCAGGACGCTGCTGCAGAGCTACTCGGACAACTACAAGCTCG | TIRTLLQSYSDNYKLAERDGALY |
| | | CCGAGAGGGACGGGGCGCTCTACCTCGGGTGGAAGAGCAGGCCACTGGTGGTCTCGTCGGCGTGGCAC | LGWKSRPLVVSSAWH* |
| | | TAG SEQ ID NO: 245 | SEQ ID NO: 246 |
| 124 | Xa21_OsJ_25599 | ATGGGTCCCCCGGATGTTATCTCTGAAAATGATGAGTTTGATTTCTCTGATGTTTTTGGCACCACTCC | MGPPDVISENDEFDFSDVFGTTP |
| | (Os07g0680900) | AGTTCAGACGCCAACAGGCATTTCGGTAGCTGGTCCAGACAGTCCTGCACCTTTGGCTGAGTCCAATG | VQTPTGISVAGPDSPAPLAESNE |
| | | AGGGGGTTTACAATGATCCTATTGTCATCATCAAGCGATCTCATTCTCTTGTTGGTCCAACATCACTT | GVYNDPIVIIKRSHSLVGPTSLV |
| | | GTTAGCCAGTCCCTGCGACTTAGCAATCTCACTCTAAATAAAACAGAGGGGTCATCAGAACCTGCAGA | SQSLRLSNLTLNKTEGSSEPAEE |
| | | AGAAAAGGAAAGGAACCTAGGGCAGCTCAGTGATGAAGAGTTTGACAATGCCACAACAGAAAATGAAG | KERNLGQLSDEEFDNATTENEGI |
| | | GTATTGGGCTTGATGACTTTGAAATCTTGAAGCTTGTAGGCCAAGGGGCATTTGGGAAAGTCTTTCAG | GLDDFEILKLVGQGAFGKVFQVR |
| | | GTGAGAAAGAAAGGTACTTCAGAGATATACGCGATGAAAGTTATGAGGAAGGATAAGATCTTGGAAAA | KKGTSEIYAMKVMRKDKILEKNH |
| | | GAACCATGCGGAGTACATGAAAGCCGAAAGAGATATATTAACAAAAGTTGACCATCCTTTTGTAGTGC | AEYMKAERDILTKVDHPFVVQLR |
| | | AGCTCAGGTACTCCTTTCAGACAAAATATCGACTTTATCTTGTCCTGGACTTCATAAATGGGGGACAT | YSFQTKYRLYLVLDFINGGHLFF |
| | | CTCTTCTTCCAGCTCTACAAGCAAGGATTGTTCAGGGAGGAACTTGCACGGATCTATACTGCTGAAAT | QLYKQGLFREELARIYTAEIVSA |
| | | TGTATCTGCTGTAGCTCACCTTCACGACAACGGGATTATGCATAGAGATCTCAAGCCTGAAAATATCC | VAHLHDNGIMHRDLKPENILLDA |
| | | TTTTGGATGCTGATGGCCATGCCATGCTCACTGACTTTGGCCTTGCCAAAGAATTTAATGAGAATACA | DGHAMLTDFGLAKEFNENTRSNS |
| | | AGATCAAACTCGATGTGTGGAACGGTTGAGTATATGGCCCCAGAGATTATTCTTGGTCGGGGGCATGA | MCGTVEYMAPEIILGRGHDKAAD |
| | | TAAGGCAGCTGACTGGTGGAGTGTTGGAATCCTCCTCTTTGAAATGCTCACGGGAAAGCCTCCGTTTG | WWSVGILLFEMLTGKPPFVGNRD |
| | | TTGGGAACAGGGATAAAGTTCAGCAGAAGATAGTGAAAGAGAAGCTGAAGCTTCCATCGTTTTTGTCC | KVQQKIVKEKLKLPSFLSSEAHS |
| | | AGTGAAGCTCATTCCCTCTTGAAAGGACTGCTCCACAAAGAAGGTGGCAAGCGGCTAGGAAGCGGTCC | LLKGLLHKEGGKRLGSGPGGSDE |
| | | GGGCGGCAGCGATGAGATAAAGAGGCACAAATGGCTCAAACCGATCAACTGGAGGAAGCTGGAGGCCC | IKRHKWLKPINWRKLEARQIQPS |
| | | GGCAGATCCAGCCGAGCTTCCGACCCAACGTGAGCGGGCTCACCTGCATCGCCAACTTCGACGAGTGC | FRPNVSGLTCIANFDECWTSMPV |
| | | TGGACCAGCATGCCGGTGCTGGACTCGCCGGTGGCCACCCCCGTCGCCGGCGGCGCCGGCCACAGCAG | LDSPVATPVAGGAGHSSFAGFTY |
| | | CTTCGCCGGGTTCACCTACGTCAGGCCGGCTCCGTTCCTCCAGGATGTCAAGCCTCCCTCTTCCTCTA | VRPAPFLQDVKPPSSSRLKD* |
| | | GGCTGAAAGACTAG SEQ ID NO: 247 | SEQ ID NO: 248 |
| 125 | Xa21_Os08g0163400 | ATGACGGCGACGCCGGCGGTGATCGGGCTGAGCGCGGGGAACAGGCTGCTGAGCGCGTCGTTCGGGCC | MTATPAVIGLSAGNRLLSASFGP |
| | | GACCGAACTGATGCCGGACAAGGTCAGCCTCGGCGTCGGGGGAGGAGGAGGTGGTGGTGGAGGTGGGG | TELMPDKVSLGVGGGGGGGGGGD |
| | | ACGCGATGTCGTTCGCGCCGCCGGCGCCCGCGACGCCGAAGCTCACCGCGGTCGCCGCGCACAGGCTC | AMSFAPPAPATPKLTAVAAHRLK |
| | | AAGCTCTCCCCGCATGGCCGCGCGCAGGTCATGCGCGCGCTCAGGCACCACTCCTCCGCGGCGGCCGC | LSPHGRAQVMRALRHHSSAAAAL |
| | | GCTCGCGCCCCCGCCCCCGCCCCCCCCGACGCCGTCGCCCGCCTCTCGCGCCGCCCACGCCCATGACC | APPPPPPPTPSPASRAAHAHDLE |
| | | TCGAGTCCTCCCTCGAGGCCATCGTGCTGCTGCAGAGGTCCATGCTCGAGAAGCAGTGGGAGCTCCCC | SSLEAIVLLQRSMLEKQWELPFD |
| | | TTCGACGACGAAGACCACGTCTCCGACGACGACGACAACCACGCCATGGCCATCGGCTTAGCCGAGGA | DEDHVSDDDDNHAMAIGLAEDDS |
| | | TGACAGCAAGGACGCCAACAAGGCCACCGTCGTCGTGGCGCGGTCCAGTGTCTCGGCGAGGCAGAGGA | KDANKATVVVARSSVSARQRRMS |
| | | GGATGAGCGGGCGGCGGCGGGGGAGGACCAAGAACGGCGCGGCGCACTTCGCCGTCAGCCCCGAGCTG | GRRRGRTKNGAAHFAVSPELMQS |
| | | ATGCAGAGCAGGAACAGGATCTACCTCAGGGGCACCGTCAGCAAGGAGCTCCTCACGCACAAGCAGGT | RNRIYLRGTVSKELLTHKQVVHL |
| | | CGTCCACCTCTCCCACAAGATCAAGGATGGCATCTGGTTGCAGCAGCAAAGATCAAAGCTGAAAGAGA | SHKIKDGIWLQQQRSKLKEKLGN |
| | | AGCTGGGAAATGAGCCCTCATACAAACAGCTGGCGCATTCGCTGAAGATATCACCGCCCGAGCTACGA | EPSYKQLAHSLKISPPELRSRMR |
| | | TCAAGGATGCGCGAGTCGTTTCTCGCAAGGGAGATGCTAACAATGAGCAACCTCCGTTTGGTCATTTC | ESFLAREMLTMSNLRLVISIAQK |
| | | CATTGCCCAGAAGTATGATAACCTTGGTGTTGAGTTGGCTGACCTCATTCAGGGTGGTCTGATAGGGT | YDNLGVELADLIQGGLIGLLRGI |
| | | TACTCCGTGGGATCGAAAAATTTGATGCATCCAGGGGCTTTAGAATTTCCACGTATGTATACTGGTGG | EKFDASRGFRISTYVYWWIRQGV |
| | | ATACGCCAGGGTGTTTCAAGAGCATTAGCTGAGAACTCAAAAACATTCAGGCTTCCAACTTATCTGCA | SRALAENSKTFRLPTYLHERLIA |
| | | TGAGCGGCTGATTGCGATTCGTGGTGCAAAGTATGCGTTGGAAGATCAAGGAATTGCTCCAACAATAG | IRGAKYALEDQGIAPTIENIAGS |
| | | AAAACATAGCAGGGTCACTCAACATATCAGAAAAGAAAGTACTCAATGCTACAGAGGCTGTGAACAAG | LNISEKKVLNATEAVNKVLSLDQ |
| | | GTTCTTTCGTTGGATCAACAAGCATTTCCATCCTTAAACGGCTTACCTGGAGAGACACTGCACAGTTA | QAFPSLNGLPGETLHSYIEDQNV |
| | | CATAGAGGATCAAAATGTCGCAAATGATCCATGGCATGGATTTGAGGAGTGGTATCTCAAGGAAGAAG | ANDPWHGFEEWYLKEEVNKLLNS |
| | | TCAACAAGCTTTTAAACTCAACTCTCAACGAGCGTGAGAGGGACATTATCCGGTTATATCATGGCATA | TLNERERDIIRLYHGIGKQCHTW |
| | | GGAAAACAATGCCATACATGGGAGGACATTAGCAGACAATTCGGGTTGTCGAGGGAGAGGGTGAGGCA | EDISRQFGLSRERVRQVGLIAME |
| | | AGTAGGACTCATTGCAATGGAGAAGCTGAAGCATGCTGCGAGGAGGAAAAATTTGGAGGCATTGCTTG | KLKHAARRKNLEALLEDY* |
| | | AGGATTATTGA SEQ ID NO: 249 | SEQ ID NO: 250 |
| 126 | Xa21_OsJ_26407 | ATGAGCTACCAGACTCCTCCTCCTGCTGCCACAGGGTACCCCTACCCGGCGCAAGAAGCAGGGCAGCA | MSYQTPPPAATGYPYPAQEAGQQ |
| | (Os08g0205700) | GCAGCAGCAGGCGTACCCTGCCTACGTGGCGCCGCCGCCGGCCGGCTACCCGACCAAGGACGGCCCGC | QQQAYPAYVAPPPAGYPTKDGPQ |
| | | AGGAGCAGTACCCCGCCGGCGCCGGCGCCGGCGAGACCACCAGCCGCGGCCACCACCACCACCACCAC | EQYPAGAGAGETTSRGHHHHHHH |
| | | CACCACGGCGACGGATTCTGGAAAGGATGCTGCGCTGCACTCTGCTGCTGCTGCCTCCTCGACATGTG | HGDGFWKGCCAALCCCCLLDMCF |
| | | CTTCTGA SEQ ID NO: 251 | * SEQ ID NO: 252 |
| 127 | Xa21_OsI_29768 | ATGGCCTCGGAGACGGAGACGTTCGCCTTCCAGGCGGAGATCAACCAGCTGCTGTCGCTCATCATCAA | MASETETFAFQAEINQLLSLIIN |
| | (Os08g0500700) | CACGTTCTACTCCAACAAGGAGATCTTCCTCCGCGAGCTCATCTCCAACTCCTCCGATGCGTTGGACA | TFYSNKEIFLRELISNSSDALDK |
| | | AGATCAGGTTCGAGAGCTTGACGGACAAGAGCAAGCTGGATGCTCAGCCAGAGCTGTTCATCCATATT | IRFESLTDKSKLDAQPELFIHIV |
| | | GTTCCTGACAAGGCCTCCAACACACTCTCGATCATCGACAGTGGTATTGGTATGACCAAGTCAGATCT | PDKASNTLSIIDSGIGMTKSDLV |
| | | TGTGAACAACCTGGGTACCATTGCCAGGTCAGGGACCAAGGAGTTCATGGAGGCACTGGCTGCTGGTG | NNLGTIARSGTKEFMEALAAGAD |
| | | CTGATGTGTCCATGATTGGTCAGTTCGGTGTTGGATTCTACTCTGCCTACCTTGTTGCCGAGAGAGTG | VSMIGQFGVGFYSAYLVAERVVV |
| | | GTTGTGACCACCAAGCACAACGATGACGAGCAGTATGTGTGGGAGTCTCAGGCTGGTGGGTCCTTCAC | TTKHNDDEQYVWESQAGGSFTVT |
| | | TGTCACACGTGACACATCTGGGGAGCAGCTTGGGAGGGGTACTAAGATCACCCTCTACCTCAAGGACG | RDTSGEQLGRGTKITLYLKDDQL |
| | | ATCAGTTGGAATACCTTGAAGAGCGCCGCCTCAAGGACCTGATCAAGAAGCACTCTGAGTTTATCAGC | EYLEERRLKDLIKKHSEFISYPI |
| | | TACCCTATCTCTCTATGGACTGAGAAGACCACCGAGAAGGAAATTTCTGATGATGAAGATGAGGAAGA | SLWTEKTTEKEISDDEDEEEKKD |
| | | GAAGAAGGATGCTGAGGAGGGCAAGGTTGAGGATGTTGATGAAGAGAAGGAAGAAAAGGAGAAGAAAA | AEEGKVEDVDEEKEEKEKKKKKI |
| | | AGAAGAAGATCAAGGAGGTTTCTCATGAGTGGTCCCTGGTCAACAAACAGAAGCCTATCTGGATGAGG | KEVSHEWSLVNKQKPIWMRKPEE |
| | | AAGCCTGAGGAGATCACTAAGGAGGAGTATGCTGCTTTCTACAAGTCCCTGACAAACGACTGGGAGGA | ITKEEYAAFYKSLTNDWEEHLAV |
| | | GCATCTTGCTGTCAAGCACTTCTCCGTGGAGGGTCAGCTGGAGTTCAAAGCTGTTCTCTTTGTTCCCA | KHFSVEGQLEFKAVLFVPKRAPF |
| | | AGAGGGCACCATTCGACCTCTTTGATACGAGGAAGAAGCTCAACAACATCAAGCTCTATGTCCGCCGA | DLFDTRKKLNNIKLYVRRVFIMD |
| | | GTCTTCATCATGGACAACTGTGAGGAGCTGATCCCTGAGTGGCTGAGCTTTGTCAAGGGCATTGTCGA | NCEELIPEWLSFVKGIVDSEDLP |
| | | CTCCGAGGATCTTCCCCTCAACATCTCCCGTGAGATGCTGCAGCAGAACAAGATTCTCAAGGTCATCC | LNISREMLQQNKILKVIRKNLVK |
| | | GGAAGAACCTTGTCAAGAAGTGCGTTGAGCTCTTCTTCGAGATTGCTGAGAACAAGGAGGACTACAAC | KCVELFFEIAENKEDYNKFYEAF |
| | | AAGTTCTATGAGGCCTTCTCCAAGAACCTCAAGCTCGGTATCCACGAGGACTCCACCAACAGAAACAA | SKNLKLGIHEDSTNRNKIAELLR |
| | | GATTGCCGAGCTCCTGAGGTACCACTCCACCAAGAGCGGCGATGAGCTGACCAGCCTCAAGGATTACG | YHSTKSGDELTSLKDYVTRMKEG |
| | | TGACGAGGATGAAGGAAGGCCAGAACGACATATACTACATCACCGGCGAGAGCAAGAAGGCCGTGGAG | QNDIYYITGESKKAVENSPFLEK |
| | | AACTCCCCCTTCTTGGAGAAGCTGAAGAAGAAGGGTTACGAGGTCCTCTACATGGTTGATGCCATCGA | LKKKGYEVLYMVDAIDEYAVGQL |
| | | CGAGTACGCTGTTGGCCAGCTCAAGGAGTTTGAGGGCAAGAAGCTCGTCTCTGCCACCAAGGAGGGAC | KEFEGKKLVSATKEGLKLDESED |
| | | TCAAGCTTGATGAGAGCGAGGACGAGAAGAAGCGGAAGGAGGAGCTCAAGGAGAAGTTTGAGGGGCTC | EKKRKEELKEKFEGLCKVIKEVL |
| | | TGCAAGGTCATCAAGGAGGTGCTCGGAGACAAGGTCGAGAAGGTGGTGGTCTCGGACCGCGTGGTGGA | GDKVEKVVVSDRVVDSPCCLVTG |
| | | CTCCCCGTGCTGCCTCGTCACCGGCGAGTACGGCTGGACGGCCAACATGGAGAGGATCATGAAGGCCC | EYGWTANMERIMKAQALRDSSMA |
| | | AGGCGCTGAGGGACTCGAGCATGGCCGGGTACATGTCGAGCAAGAAGACGATGGAGATCAACCCGGAG | GYMSSKKTMEINPENAIMEELRK |
| | | AACGCCATCATGGAGGAGCTCCGCAAGCGCGCCGACGCCGACAAGAACGACAAGTCCGTCAAGGACCT | RADADKNDKSVKDLVLLLFETAL |
| | | CGTCTTGCTCCTCTTCGAGACGGCCCTCCTCACCTCCGGCTTCAGCCTCGACGACCCCAACACCTTCG | LTSGFSLDDPNTFGSRIHRMLKL |
| | | GCAGCAGGATCCACCGCATGCTCAAGCTTGGCCTGAGCATCGACGAGGATGAGACGGCGGAGGCCGAC | GLSIDEDETAEADTDMPPLEDDA |
| | | ACCGACATGCCGCCGCTCGAGGACGACGCCGGCGAGAGCAAGATGGAGGAGGTCGACTAA | GESKMEEVD* |
| | | SEQ ID NO: 253 | SEQ ID NO: 254 |
| 128 | Xa21_Os08g0520000 | ATGGGCATGGAGGAGGAGGGGGTGGCGCGCGGCGGCGGCGGCGGCAAGAAGCTCGCGCTCGCCAGCAT | MGMEEEGVARGGGGGKKLALASI |
| | | CGGCTTCGCGGACGTCCGTGTCGGCGCCGTGGCTGGCGGCGGCGGCGGGTACAAGGAAGACTTGGTAG | GFADVRVGAVAGGGGGYKEDLVV |
| | | TCGTGGGCCTGCCCAAGGACGACGACTTCGATGTCGCCAAGGTCGTCGGGGACGTGGCCGTCGGGCTG | VGLPKDDDFDVAKVVGDVAVGLP |
| | | CCGGACGTCGGCGGCGCCGTCAGGAATTTCCTGAGGAATAGAGAAGTTGGAGAATTCATGAGTGGGGC | DVGGAVRNFLRNREVGEFMSGAL |
| | | ATTAGCTGGTGCTATGACTAAAGCTGTTCTTGCTCCTCTAGAAACTATCAGGACAAGAATGGTTGTTG | AGAMTKAVLAPLETIRTRMVVGV |
| | | GGGTAGGATCAAAACACATTTTTGGTAGTTTTGTGGAGATCGTCGAACAAAATGGCTGGCAAGGACTC | GSKHIFGSFVEIVEQNGWQGLWA |
| | | TGGGCAGGTAATACAATAAATATGCTCCGGATTATTCCAACTCAAGCACTTGAGCTTGGCACATTTGA | GNTINMLRIIPTQALELGTFECV |
| | | GTGTGTCAAAAGGAGCATGACAGAAGCACAAGAGAAATGGAAGGAAGATGGGTGCCCAAAGATACAAA | KRSMTEAQEKWKEDGCPKIQIGN |
| | | TTGGCAATTTGAAAATTGAGCTGCCGCTTCACTTGCTCTCTCCAATTGCTGTTGGTGGTGCGGCTGCT | LKIELPLHLLSPIAVGGAAAGIV |
| | | GGAATAGTTAGCACCTTAGTGTGCCATCCTCTTGAGGTTCTTAAGGACCGCCTGACTATCAACCGTGA | STLVCHPLEVLKDRLTINREAYP |
| | | GGCTTATCCAAGTATCGGCCTTGCCTTCAACAAGATATACCAAACTGATGGTATTGGTGGTCTCTATG | SIGLAFNKIYQTDGIGGLYAGLC |
| | | CTGGCCTCTGCCCAACACTAGTTGGCATGCTTCCTTATAGCACCTGCTACTATTTCATGTATGAGACG | PTLVGMLPYSTCYYFMYETIKTS |
| | | ATCAAGACTTCTTATTGCCGTGCACATAAAAAGAAGTCCTTGACCCGTCCTGAGCTACTCATAATTGG | YCRAHKKKSLTRPELLIIGALSG |
| | | AGCTCTTTCAGGTCTAACTGCAAGTACAATAAGCTTCCCTCTGGAAGTGGCGAGGAAGCGGCTTATGG | LTASTISFPLEVARKRLMVGTLQ |
| | | TTGGAACCCTGCAAGGGAAATGCCCGCCCCACATGATCGCGGCCTTAGCTGAGGTGTTCCAAGAGGAG | GKCPPHMIAALAEVFQEEGIKGL |
| | | GGCATCAAGGGACTTTACCGCGGATGGGCCGCAAGCTCCCTGAAGGTGATGCCGACCTCCGGCATTAC | YRGWAASSLKVMPTSGITWMFYE |
| | | CTGGATGTTCTATGAGGCATGGAAGGACATTCTTTTGGCTCCAGAGCTGCACACCTAG | AWKDILLAPELHT* |
| | | SEQ ID NO: 255 | SEQ ID NO: 256 |
| 129 | Xa21_Os08g0526100 | ATGATGCCGCACTGCGGCGTGGTGGACGCGGCGGCGAAGGGGGTGAAGCTGGGGGGCGGTGGTGGCGG | MMPHCGVVDAAAKGVKLGGGGGG |
| | | GGCGCTGATGGTGCGCCGGGTGGCGAGCGGCAAGCTCCTGTCGGCGTCGTCGCACCTGCTGTTCCGCG | ALMVRRVASGKLLSASSHLLFRA |
| | | CCACCGTACTCGCCACGCTGGCGCTTGTGTTCCTCTTCACGTTCCACTACCCGTCGCTGCTGTCGCGC | TVLATLALVFLFTFHYPSLLSRS |
| | | TCCTTCACGCTCTCCTCCGGCGCCGGCGGCGGCGAGGGGGGAGCCGCGGCGCACGCCTCGCACCGGAG | FTLSSGAGGGEGGAAAHASHRSL |
| | | CTTGCTCATGTCGTCGTCGTCGGCGTCGGCGGCGTCGGTGTACGGGGGCGCGGCGTGGGAGAAGGAGG | LMSSSSASAASVYGGAAWEKEVR |
| | | TGAGGCGGAGCGCGAAGCCGAGGAAGGACGGGGGGATCGCCGTGCTGGTGACCGGCGCGGCGGGGTTC | RSAKPRKDGGIAVLVTGAAGFVG |
| | | GTCGGCACGCACTGCTCGCTGGCGCTCAGGGCGCGCGGCGACGGCGTGCTGGGGCTCGACAACTTCAA | THCSLALRARGDGVLGLDNFNAY |
| | | CGCCTACTACGACCCGGAGCTGAAGCGCGCGCGGCAGAGGCTCCTCGCCGGCCGCGGCGTGCTCGTGC | YDPELKRARQRLLAGRGVLVLDA |
| | | TCGACGCCGACATCAACGACGCGCTCCTGCTCGAGAAGCTGTTCGACCTGGTGCCGTTCACCCACGTG | DINDALLLEKLFDLVPFTHVLHL |
| | | CTGCACCTCGCCGCGCAGGCCGGCGTGCGCTACGCCATGGAGGCGCCGCAGACGTACGTGGCGTCCAA | AAQAGVRYAMEAPQTYVASNVAG |
| | | CGTCGCGGGGCTCGTGACCGTCCTCGAGGTCGCTGCCAAGCACGCCGACCCGCAGCCGGCGATCGTCT | LVTVLEVAAKHADPQPAIVWASS |
| | | GGGCGTCGTCGTCGTCGGTGTACGGGCTCAACACCGACGCGCCCTTCTCCGAGGAGCACCGCACCGAC | SSVYGLNTDAPFSEEHRTDRPAS |
| | | CGGCCGGCGTCGCTGTACGCGGCGACCAAGAAGGCCGGCGAGGCCATCGCCCACGCGTACAACCACAT | LYAATKKAGEAIAHAYNHIYGLS |
| | | CTACGGCCTCTCCATCACCGGCCTCCGCTTCTTCACCGTGTACGGTCCATGGGGCCGCCCCGACATGG | ITGLRFFTVYGPWGRPDMAYFSF |
| | | CCTACTTCTCCTTCGCCCGCAGCATCGTCGCCGGCGAGCCCATCACGCTGTTCCGCACCGCCGACGGC | ARSIVAGEPITLFRTADGADARR |
| | | GCCGACGCGCGCCGCGACTTCACCTACATCGACGACGTCGTCAAGGGCTGCCTCGGCGCGCTCGACAC | DFTYIDDVVKGCLGALDTAGEST |
| | | GGCCGGCGAGAGCACCGGCACCAAGTCCGGCAAGAAGCGCGGCCCGGCGCCGCTCCGCGTCTACAACC | GTKSGKKRGPAPLRVYNLGNTSP |
| | | TCGGCAACACCTCGCCGGTGCCGGTCACCCGCATGGTCGCCATCCTCGAGAAGCTCCTCGGCAGGAAG | VPVTRMVAILEKLLGRKANKRVV |
| | | GCGAACAAGCGCGTCGTCACCATGCCGAGCAATGGCGACGTGCCGTTCACCCACGCCAACGTCAGCCA | TMPSNGDVPFTHANVSHAARDFG |
| | | CGCCGCGCGCGACTTCGGCTACCGCCCGGCGACCTCCCTCGACGCCGGCCTCCGCCGCTTCGTCGACT | YRPATSLDAGLRRFVDWFVHYYK |
| | | GGTTCGTCCACTACTACAAGCTCGACACGGCCAAGATCGCCAAGGGCAAGAGGAAATCCATGGCCATG | LDTAKIAKGKRKSMAMSAAS* |
| | | TCCGCCGCGTCGTGA SEQ ID NO: 257 | SEQ ID NO: 258 |
| 130 | Xa21_Os09g0115500 | ATGGACGCCACGCTGCTCCGCTCCGCCGATGCCGCCGTCGCCGTCCGCTCCACCACCATTGCGCCTCC | MDATLLRSADAAVAVRSTTIAPP |
| | | GCCTCGCCCTCGCCTCCACCGCCCCCTCCCGTCCTCCTGCGCCTGCGGGCCCCTCCGCGCCTACGCCG | PRPRLHRPLPSSCACGPLRAYAA |
| | | CTCCCGCTGCCCCCGCGCCCGCCGCGCACAACAACGGAGTCTACACAGTTGGTGACTTCATGACCAAA | PAAPAPAAHNNGVYTVGDFMTKR |
| | | AGGCCTAATCTCCATGTCGTTACACCTGCAACCTCGGTTGATGAAGCTCTCGAGACGCTGGTGCAACA | PNLHVVTPATSVDEALETLVQHK |
| | | CAAGATCTCCGGTTTCCCTGTTGTTGATGACACCGGAAAGTTGGTGGGTGTTGTCTCAGATTATGATC | ISGFPVVDDTGKLVGVVSDYDLL |
| | | TGTTAGCACTTGACTCAATATCAGGAAGTGGACTGACTGGCACAAACACAAGCATGTTTCCTGAGGTG | ALDSISGSGLTGTNTSMFPEVDS |
| | | GATAGTACTTGGAAGACATTTCGCGAGATACAGAGACTCTTGAGCAAAACCAATGGCAAAGTCATCGC | TWKTFREIQRLLSKTNGKVIADV |
| | | TGATGTGATGACTTATTCGCCTCTTGCGGTTCGTGAAAGTACCAACCTTGATGCTGCTACAAGGTTGC | MTYSPLAVRESTNLDAATRLLLE |
| | | TACTTGAAACCAAATATCGCAGATTGCCTGTTGTTGATAGCACTGGTAAATTGGTTGGGATGATCACA | TKYRRLPVVDSTGKLVGMITRGT |
| | | AGGGGGACTGTTGTCAGAGCTGCCCTCAAAATAAAGAAGACAGCTGAAGAAACTGCTTAA | VVRAALKIKKTAEETA* |
| | | SEQ ID NO: 259 | SEQ ID NO: 260 |
| 131 | Xa21_Os09g0334500 | ATGGAGAGCATGGAGGGCAATGGAGGAGGGCGGCTGGTGGTGACCGAGCTGAGCCACATCAAGGAGCT | MESMEGNGGGRLVVTELSHIKEL |
| | | CGTGAGGCAGCTGGAGGGGCACCTGGGTGGCTCCGGCTCCCCCGACCTCTGCAAGCACCTGGCCTCGC | VRQLEGHLGGSGSPDLCKHLASQ |
| | | AGATCTTCTCCGTCACCGAGCGCTCCATCGGCATGATCAGGTCCGGCCACTTCGACGGCCACCGCAAG | IFSVTERSIGMIRSGHFDGHRKR |
| | | CGCTCCGCCGCCGCTGTCGCCGCCGGTGACCTCGACTCGGCGACCCCCAGCCCCCTCAGCGACGTCTC | SAAAVAAGDLDSATPSPLSDVSD |
| | | CGACTTGCCTTTCAAGGCCACCAAGAAGAGGAAGACGTCGACGGAGAAGAAGAGGCATCAGATTAGGG | LPFKATKKRKTSTEKKRHQIRVS |
| | | TGAGCTCGACGGGAGGGGTGGAGAACCCACCGGTGGATGATGGCCATAGCTGGAGAAAGTATGGGCAG | STGGVENPPVDDGHSWRKYGQKE |
| | | AAAGAGATTCTTGGAGCCAAGCACCCAAGGGGTTACTACCGTTGCACCCACCGCAACTCGCAGGGATG | ILGAKHPRGYYRCTHRNSQGCMA |
| | | CATGGCGACGAAGCAGGTGCAGCGCACCGACGAGGACCCGACGGTGTTCGACGTGATCTACCACGGCG | TKQVQRTDEDPTVFDVIYHGEHT |
| | | AGCACACGTGCGTCCACAAGGCGGTGGCCGCCGGCGCCGGCGCCGGCAAGCCGGAGACGGAGACGGAC | CVHKAVAAGAGAGKPETETDTNA |
| | | ACGAACGCCGCCGCCGAGAGCCGCCTCCATGACATGAGCTGCGGCCTGACGGTGAAGATCGAGGGGCT | AAESRLHDMSCGLTVKIEGLTAT |
| | | GACGGCGACGCCGCCGCAGGGCGGCGGCGGCTGGAACGCCATGCCGCCGTTCTGCCTCACGTCGCCGG | PPQGGGGWNAMPPFCLTSPVSGL |
| | | TGAGCGGCCTGGCGCCGCCGGATCAGCACAACCCGTTCTCGGCGCCGTCGACGCCGGAGAACCGCCTC | APPDQHNPFSAPSTPENRLAAAA |
| | | GCCGCCGCCGCGTCGTCGGCGGCCTCGCCGGCGACCTCCGACTCGATGGCCGCCGCGCCGTTCCACCA | SSAASPATSDSMAAAPFHQAAAG |
| | | GGCGGCGGCCGGCGGCGGCGACGCGGCGTGGCGGGACGCCGAGCTCCAGGAGGTGGTGTCCGCGCTCG | GGDAAWRDAELQEVVSALVAATT |
| | | TCGCCGCGACGACGACGACGACGGCTACCGCGCAGCCGGCGCCCGCCTCCGCCATGGTCGACGCCGAC | TTTATAQPAPASAMVDADLSALD |
| | | CTCTCCGCCCTCGACGCCTTCGAGTTCGACCCCGGATTCACCATTGATATCACCAGCTTCTTCGCATG | AFEFDPGFTIDITSFFA* |
| | | A SEQ ID NO: 261 | SEQ ID NO: 262 |
| 132 | Xa21_Os09g0378700 | ATGTCGTCGCCGCCGCCGCCGCCGAGCAAGCCGAAGCGCCGGCGGCTACTGTCTCTTCCGGCGGTCTA | MSSPPPPPSKPKRRRLLSLPAVY |
| | | CCCGTGCGAGGACATCACGCCGGCGCCGCTGCTCGCCTCGCTGCTCTCCCTCGCGGCGGATGTCGCCT | PCEDITPAPLLASLLSLAADVAC |
| | | GCCGTCGGGCGGCCGACGTCGACGCCTTCCCCGTTCTCCGCCGCGGCGTGCGCAAGGCCGTGCGGCTC | RRAADVDAFPVLRRGVRKAVRLA |
| | | GCCGGGATCCTGCTCGCGTTCCTCGAGGAGGTTCAGGATGCGGCAGCGGCGGGGAAGGCGACGGCGAT | GILLAFLEEVQDAAAAGKATAMP |
| | | GCCGTCGTCTGCGGTGCTTGGGCTGACGGAGCTGCACGTGGCGATGCAGAAGCTGCGGTTCCTGCTCG | SSAVLGLTELHVAMQKLRFLLAD |
| | | CGGACTGCGCGCGGCGGGGCGCGCGGCTGTGGGTGCTCGTGAACGCCGGGATGGTGGCGTCGGAGCTC | CARRGARLWVLVNAGMVASELRL |
| | | AGGTTGGTGCTCGGGTCGGTCGCGGCGGCCATGGACGCGCTTCCGAGGAGCGTCGCGGAGGCGTCGGT | VLGSVAAAMDALPRSVAEASVDA |
| | | GGATGCCGGGGAGCTCGCGCGGGTGGTATCGGAGCAGGCGTGGCGCGCGGTGGTGCGGCCCGACGGCG | GELARVVSEQAWRAVVRPDGADE |
| | | CAGACGAACGCGCGGCGCGGAGCGTGCGGTCGATCCTGGATCAGTTCAAGGACGGCGTCGCGCCGGAC | RAARSVRSILDQFKDGVAPDADD |
| | | GCCGACGACGTGAGGCGGGTGCTCCGCCGGGTCAGGGTCGGGAGCTGGTCGGATTGCTCCGAGGAGAT | VRRVLRRVRVGSWSDCSEEIAFL |
| | | CGCGTTCCTGGAGAGCGAGATTTGCGCGCGGCTGGACGCCGGCGACGAGAACAGCAATGACGTTATCG | ESEICARLDAGDENSNDVIVMNS |
| | | TCATGAACAGCTTAATGGCGTTCCTGGTGTACTGCCGCGTCGTGCTGTTCGACCACATTGACGCGAGC | LMAFLVYCRVVLFDHIDASKSQP |
| | | AAGTCGCAACCGGCGGCGGCGGCGGCGCCGGCGCCGGCGAGGTGCCCGGAATGGATCAGACCGGAAGC | AAAAAPAPARCPEWIRPEALQCP |
| | | GCTGCAGTGCCCGATCACTCTGGACCTCATGACCGATCCGGTGACCGTGTCCACCGGCCAGACATACG | ITLDLMTDPVTVSTGQTYDRASI |
| | | ACCGGGCGTCGATCACCCGGTGGATGAAGGCCGGTTGCCGCACGTGCCCGGTCACCGGCGAGAGGCTG | TRWMKAGCRTCPVTGERLSTADL |
| | | AGCACCGCCGACCTCGTCCCCAACACCGTGCTCCGCGGGATCATCGAGCGGATGCTTCTCATCAATGG | VPNTVLRGIIERMLLINGVTLPE |
| | | CGTCACCCTCCCGGAGCCGAGCGCCGCCGGCGGCGGTGGCCACCGCCACGGCGCCGTCGCGAACACGG | PSAAGGGGHRHGAVANTAVPFGL |
| | | CCGTGCCGTTCGGCCTGGCCGCCGCGGGGGCCGCGCGCCTCGCCGTCGCGCACATCGTGGCGCAGCTC | AAAGAARLAVAHIVAQLSRGSTE |
| | | TCGAGGGGGTCGACGGAGGAGCGGAGGAAGGCGACGTCGGAGGCACGGAAGCTGTCGAAGCACAGCGT | ERRKATSEARKLSKHSVFYRACL |
| | | GTTCTACCGGGCTTGCCTCGTCGACGCCAACGCCGTGCCGTGGCTGCTGTGCCTCCTCTCCTCCACCG | VDANAVPWLLCLLSSTDAAVQDN |
| | | ACGCCGCCGTGCAGGACAATGCCGTGGCGTCGCTGCTCAACCTCTCGAAGCACCCCGCCGGCAGGACG | AVASLLNLSKHPAGRTAIVEVGG |
| | | GCCATCGTGGAGGTCGGCGGCGTCGGCCTCGTCGTCGACGTGATCAACGTCGGCGCCAAGGCCGAGGC | VGLVVDVINVGAKAEAQHNAAAV |
| | | GCAGCACAACGCGGCGGCCGTCCTCTTCTACCTCTCGTCGAACAGCCCGGACTCCGCCGAGGAGATCG | LFYLSSNSPDSAEEIGRIPEAIP |
| | | GCCGCATCCCGGAGGCGATCCCGACGCTGGTCCAGCTCATCCGGGACGGCGCGTACCGCGGGCGGAAG | TLVQLIRDGAYRGRKNAMVSLYG |
| | | AACGCCATGGTCAGCCTGTACGGGCTGCTCCAGAGCGCCGCCAACCACGGCAGGGCCATCGCCGCGGG | LLQSAANHGRAIAAGAVSALAAL |
| | | CGCCGTGTCAGCGCTCGCCGCGCTGCTGCTCTCCGCCGACCGCGACGACCTCGCCGGGGACAGCGTCG | LLSADRDDLAGDSVALLARIAEQ |
| | | CGCTGCTGGCGAGGATCGCCGAGCAGCCGTCTGGCGCCGCGGCCGTCCTCTCGCAGCCGGGGCTCGTC | PSGAAAVLSQPGLVARLAEALAS |
| | | GCTCGCCTCGCCGAGGCGCTCGCCTCCGCCTCGGCGTCGTCGTCCCGGTCGGCGAGAGACCACAGCGT | ASASSSRSARDHSVSLLASLCRH |
| | | GTCGCTCCTCGCCTCGCTGTGCCGGCACGGCGGCGCCAAGGTGGTCGCCGTGCTGGGGCGGATGCCGG | GGAKVVAVLGRMPGLMASLYSLV |
| | | GGCTGATGGCGTCGCTCTACTCGCTCGTCGCCGACGGGGGCAGCCCGCAGACGAGCAAGAAGGCGCGG | ADGGSPQTSKKARALLNEIHRHY |
| | | GCGCTGCTCAACGAGATCCACCGGCATTACGAGGTGGCGCCGCCGCCGCCGGCGTCGTCGGCGTCGTC | EVAPPPPASSASSDAGGDRVVRV |
| | | GGACGCCGGCGGTGACCGTGTCGTTCGCGTGCTATAG SEQ ID NO: 263 | L* SEQ ID NO: 264 |
| 133 | Xa21_Os09g0491756 | ATGGCCGAGCACCTCGCTTCCATCTTTGGCACGGAGAAGGACCGCGTGAACTGCCCCTTCTACTTCAA | MAEHLASIFGTEKDRVNCPFYFK |
| | | GATCGGCGCGTGCCGCCATGGCGACCGATGCTCCCGCCTGCACAACAAGCCGTCGGTCTCGCCGACGC | IGACRHGDRCSRLHNKPSVSPTL |
| | | TTCTGCTCTCCAACATGTACCTGCGCCCGGACATGATCACCCCCGGAATCGACGCGCAGGGCAACCCC | LLSNMYLRPDMITPGIDAQGNPI |
| | | ATCGACCCCGAGAAGATCCAGGCCGACTTCGAGGATTTCTACGAGGACATCTTTGAGGAACTCAGCAA | DPEKIQADFEDFYEDIFEELSKY |
| | | GTACGGCGAGATCGAGAGCCTCCACGTGTGTGACAACTTCGCTGACCACATGATCGGCAATGTGTATG | GEIESLHVCDNFADHMIGNVYVQ |
| | | TTCAATTCAGGGAGGAGGATCAGGCCGCCAGAGCGCTGCAGGCGCTGACGGGGCGGTACTACTCCGGC | FREEDQAARALQALTGRYYSGRP |
| | | CGCCCTATCATTGTCGAGTTCTCGTCGGTGACCGATTTCCGGGAGGCCACCTGCCGGCAATATGAAGA | IIVEFSSVTDFREATCRQYEENS |
| | | GAACAGCTGCAACCGTGGTGGGTACTGCAACTTCATGCACGTCAAGGAGATCGGCAGAGACCTGAGGA | CNRGGYCNFMHVKEIGRDLRKRL |
| | | AGAGGTTGTTTGGGCACCTGCATAGGTCCCGGAGAAGCCATAGCCATGGCCGGAGCCGCAGCCCGAGC | FGHLHRSRRSHSHGRSRSPSPYH |
| | | CCGTACCATTACCGGAGGGACTATGATCGGAGGAGCTCATCGCGGTCCAGGGACCGTGATGATTACTA | YRRDYDRRSSSRSRDRDDYYRGG |
| | | CCGTGGAGGTAGCTGGAGGAGCAGCGAGAGGCACCGCAGCAGCTACGACAGCGATGGCAGCAGGCGGC | SWRSSERHRSSYDSDGSRRRHRS |
| | | GGCACAGGTCCAGGACTAGGAGTCCTGTCAGGGATGGTAGCGAGGAGAGGAGAGCTCGGATTGAGCAG | RTRSPVRDGSEERRARIEQWNRE |
| | | TGGAACCGTGAAAGGGAGGCTGCACATGTGTGA SEQ ID NO: 265 | REAAHV* SEQ ID NO: 266 |
| 134 | Xa21_Os09g0522000 | ATGGAGGCGGAGGAGGCGACGTACAGGACGGTGTGGTCGGAGCCGCCGAAGAGGCCGGCGGGGAGGAC | MEAEEATYRTVWSEPPKRPAGRT |
| | | CAAGTTCAGGGAGACGAGGCACCCGGTGTACCGCGGCGTGCGGCGGCGCGGGGGGCGGCCGGGCGCGG | KFRETRHPVYRGVRRRGGRPGAA |
| | | CGGGGCGGTGGGTGTGCGAGGTGCGGGTGCCCGGGGCGCGCGGCTCCAGGCTGTGGCTCGGCACGTTC | GRWVCEVRVPGARGSRLWLGTFA |
| | | GCCACCGCCGAGGCGGCGGCGCGCGCGCACGACGCCGCCGCGCTGGCGCTCCGCGGCAGGGCCGCCTG | TAEAAARAHDAAALALRGRAACL |
| | | CCTCAACTTCGCCGACTCCGCGTGGCGGATGCCGCCCGTCCCCGCGTCCGCCGCGCTCGCCGGCGCGA | NFADSAWRMPPVPASAALAGARG |
| | | GGGGGGTCAAGGCCGCCGTCGCCGAGGCCGTCGAGGCGTTCCAGCGCCAGTCGCAGCCCGTGTCCACG | VKAAVAEAVEAFQRQSQPVSTAP |
| | | GCGCCGTCGTCTCCGGCGGAGACCTTCGCCGACTACGGCGACGAAGAGGAAGACAACAAGGACGTGTT | SSPAETFADYGDEEEDNKDVLPA |
| | | GCCGGCGGTGGCGACGGTGCCCGGCGACGCGGGGGCGTTCGAGCTCGATGACGGGTTCAGGTTCGGCG | VATVPGDAGAFELDDGFRFGGMD |
| | | GGATGGACGCCGGGTCGTACTACGCGAACTTGGCGCAGGGGCTGCTCGTCGAGCCGCCGGGCGCCGGA | AGSYYANLAQGLLVEPPGAGAWW |
| | | GCGTGGTGGGAGGACGGCGAGCTCGCCGGCTCCGACATGCCGCTCTGGAGCTACTAA | EDGELAGSDMPLWSY* |
| | | SEQ ID NO: 267 | SEQ ID NO: 268 |
| 135 | Xa21_Os09g0526600 | ATGGCGGAGCAGGGGGCGGGAGAGGCGGATGCGGGCGGCGGTGGCGGGGGAGGGGAGCCGCCGCCGCC | MAEQGAGEADAGGGGGGGEPPPP |
| | | GGCGGTGATGACGGCGGCGGCGGAGGCGCTGGCGGGGCAGAGGTCGCTGCCGACGCCGTTCCTGACGA | AVMTAAAEALAGQRSLPTPFLTK |
| | | AGACGTACCAGCTGGTGGAGGACCCGGCGGTGGACGACGTGATCTCGTGGAACGAGGACGGGTCGACG | TYQLVEDPAVDDVISWNEDGSTF |
| | | TTCGTGGTGTGGCGGCCGGCGGAGTTCGCGCGGGACCTCCTCCCCAAGTACTTCAAGCACAACAACTT | VVWRPAEFARDLLPKYFKHNNFS |
| | | CTCCAGCTTCGTGCGCCAGCTCAACACCTATGGATTTAGGAAGATCGTGCCGGACCGGTGGGAGTTCG | SFVRQLNTYGFRKIVPDRWEFAN |
| | | CCAACGACTGCTTCCGGCGAGGGGAGAAGCGTTTGTTGTGTGATATACACCGCCGGAAGGTGGCGGCG | DCFRRGEKRLLCDIHRRKVAAAA |
| | | GCGGCGGCGGCGGCGCCGACGGCAGCTGCCGCGGTGGCTTCGGGAGCTGTGACGGTGGCCGCGGCGCC | AAAPTAAAAVASGAVTVAAAPIP |
| | | GATACCTATGGCGCTGCCGGTGACGCGGGCGGGCTCGCCGGCGCACTCCTCGGAGGAGCAGGTGCTGT | MALPVTRAGSPAHSSEEQVLSSN |
| | | CGTCAAACTCCGGGTCGGGGGAGGAGCACCGGCAAGCGTCCGGGTCCGGCTCTGCGCCCGGCGGCGGC | SGSGEEHRQASGSGSAPGGGGGG |
| | | GGCGGCGGCTCCGCGTCCGGCGGCGACATGGGCGAGGAGAACGAGCGGCTCCGGCGGGAGAACGCGCG | SASGGDMGEENERLRRENARLTR |
| | | GCTGACGCGGGAGCTCGGCCACATGAAGAAGCTCTGTAACAACATCCTCCTCCTCATGTCCAAGTACG | ELGHMKKLCNNILLLMSKYAATQ |
| | | CCGCCACCCAGCACGTGGAGGGCTCCGCGGGGATATCCTCCATAGCGAACTGCTCCGGCGAGTCGTCG | HVEGSAGISSIANCSGESSEAVP |
| | | GAGGCCGTTCCCCCGCCGCCGCCTCTCCCCCCGGCGATACTCGATCTAATGCCCTCCTGCCCCGCCCT | PPPPLPPAILDLMPSCPALATAA |
| | | GGCCACCGCCGCCGCCGCCGCGGGGCTCGCCATAGACGTCGAGCCCGACCCGAGCGCGCGCCTGTTCG | AAAGLAIDVEPDPSARLFGVSIG |
| | | GCGTCTCCATCGGCCTGAAGCGGACTCGAGGCGACGCCGCCGCCGACGACGAAGACGGCGGCGGCGAG | LKRTRGDAAADDEDGGGEDQAEH |
| | | GATCAGGCCGAGCACGGCGGCGCGGACGTGAAGCCGGAGGCGGCGGATCCGCATCCCGCCGGCGGCGG | GGADVKPEAADPHPAGGGGGSST |
| | | CGGCGGAAGCAGCACGGAGGCGTCGCCGGAGTCGCACCCGTGGCCCATATACCGGCCAACCCCCATGT | EASPESHPWPIYRPTPMYHAVRP |
| | | ACCACGCGGTCAGGCCCACTTGCAACGGGCCGGACAGGGCCGGGTCCGACCAAGACGGGTCCAGCTCC | TCNGPDRAGSDQDGSSSSQTMGP |
| | | AGCCAAACGATGGGGCCTGATGAATTCGACGGTCCGCGAAAGACGTTGGTGGTGCAACAGAGCAACTT | DEFDGPRKTLVVQQSNFMMHWGH |
| | | CATGATGCACTGGGGGCATTCGGAATGCGGTAGTGGCGCAAGGGGTTTTGGATGGTGA | SECGSGARGFGW* |
| | | SEQ ID NO: 269 | SEQ ID NO: 270 |
| 136 | Xa21_Os09g0565300 | ATGTTCTTTTCTACTTTCTTGCTGCTGTTCTGGACCATTTATTCTTGGACTGTACGCCTGAATAGAGA | MFFSTFLLLFWTIYSWTVRLNRD |
| | | TGAGATCGGCAACCTGAGGATCAACAACTCCTGGGATTCGCAGAGATATGATACCTTGGATCAGGTTA | EIGNLRINNSWDSQRYDTLDQVK |
| | | AGGAAGCTCTTGAAAAGGTCGGTCTCGAGTCGTCCAATATTATCATTGGAGTGGATTTCACCAAAAGC | EALEKVGLESSNIIIGVDFTKSN |
| | | AACGAGTGGACAGGGAAACATTGTTTCAACGGGAGAAGCCTGCATCACATTTCAGAGGACTCCCTCAA | EWTGKHCFNGRSLHHISEDSLNP |
| | | CCCGTACGAGCAAGCGATTAGTATCATCGGCAAGACCTTATCGACGTTCGACGAAGACAACAGGATCC | YEQAISIIGKTLSTFDEDNRIPC |
| | | CATGTTTTGGATTTGGGGACAGTAAGCAAAAGCTTCTCCGTCGTCTTCTAGTTCTTTCTCTCTGCATT | FGFGDSKQKLLRRLLVLSLCISL |
| | | TCTCTGTTGAGAAATGAAGTGAGATACTGA SEQ ID NO: 271 | LRNEVRY* SEQ ID NO: 272 |
| 137 | Xa21_Os10g0497700 | ATGGCGATTGGTGTTGGTGGCTGCTGCGCCGTGCTGCTCGCGGCGACGCTGCTCTTCTCCTCTCCGGT | MAIGVGGCCAVLLAATLLFSSPV |
| | | CACCTCATATGCTTATGATTCCCTGGATCCAAAAGGCAACATCACGATAAAATGGGATGTCATGCAAT | TSYAYDSLDPKGNITIKWDVMQW |
| | | GGACTCCTGATGGCTATGCTGCCGTTGTCACACTGTCCAACTACCAGCAATTCCGGCACATCCAGCCA | TPDGYAAVVTLSNYQQFRHIQPP |
| | | CCGGGGTGGCAGCTGGGGTGGACATGGCAGCAGAAGGAGGTGATCTGGTCCATGTACGGCGCGCTGGC | GWQLGWTWQQKEVIWSMYGALAT |
| | | CACCGAGCAGGGCGACTGCTCGATGTCCAAGGAGGGCAGCAATGTCCCCCACAGCTGCAAGAAGGATC | EQGDCSMSKEGSNVPHSCKKDPT |
| | | CCACCGTCGTCGACCTCCTCCCGGGCACCCCAATCGACCTGCAGATCGCCAACTGCTGCAAGGCTGGA | VVDLLPGTPIDLQIANCCKAGSL |
| | | TCACTGAGCGCATTCAGCCAGGACCCGGCGAATTCTGCCGCGGCGTTTCAGATCATTGTAGGTCATTC | SAFSQDPANSAAAFQIIVGHSGN |
| | | TGGGAACAGCAATGAGACGGTTAGGGTGCCGAAGAACTTCAGTCTTATGGCGCCTGGTCCGGGGTATA | SNETVRVPKNFSLMAPGPGYTCS |
| | | CCTGTAGCCGTGCTATGATTGTGAAGCCTAGTAGGTTTTTAAGTCAGGATGGGAGGAGGGCGACTCAA | RAMIVKPSRFLSQDGRRATQALM |
| | | GCTCTGATGACATGGAATGTGATCTGCACATACTCCCAATTTCTTGCACAAAAGGTTCCATCCTGCTG | TWNVICTYSQFLAQKVPSCCVSL |
| | | TGTTTCTCTCTCGTCGTTCGACAATGACAAAACTGTTGACTGCCCAACATGCTCTTGTGGCTGCCAAA | SSFDNDKTVDCPTCSCGCQNEKS |
| | | ATGAAAAATCTACTACAGGAAAATGTGTAAAGAAGAATGCACCTGATTTGCAATCCATCATTCACGGC | TTGKCVKKNAPDLQSIIHGPGRW |
| | | CCTGGCAGATGGACCTGGCAGCCTCTTCTCCAGTGCACTTCACACATGTGCCCAGTGAAAATTAACTG | TWQPLLQCTSHMCPVKINWHLML |
| | | GCACTTGATGCTCAAAGACAAGGAACACTACAGAGTGAAAATCACTGTCACTAACTTGAACTACCGCA | KDKEHYRVKITVTNLNYRMNFTE |
| | | TGAATTTCACCGAATGGAACCTGGTTGTTCAGAATCCCAACTTAGATAGTATCACCCAGATATCTGGC | WNLVVQNPNLDSITQISGFNYKP |
| | | TTCAATTACAAGCCTCTTATGCCATATGGAGGCGGCATAAATGATACTACGATGCTATGGGGAGTAAA | LMPYGGGINDTTMLWGVKSYNDL |
| | | GTCCTACAATGATTTGCTCATGCAAGCTGGTCCGCTTGGAAATGTGCAAGGAGAACTGATTGTGAGAA | LMQAGPLGNVQGELIVRKDSRAS |
| | | AGGATTCCAGGGCTTCTTCCACTACTAACAAGGGATGGGCCTTCCCTACCCGTGTGTACTTCAACGGT | STTNKGWAFPTRVYFNGDNCVMP |
| | | GATAACTGTGTGATGCCGCCTCCGGATGCATATCCGGTTAGTATTACGGCTTAG | PPDAYPVSITA* |
| | | SEQ ID NO: 273 | SEQ ID NO: 274 |
| 138 | Xa21_OsJ_34925 | ATGCTTGTCAGGTTAGGCGTCGTTGTTGTGGCCTCCGTCGCAGCTTTAACTCTTAAGAGAGCCAATAG | MLVRLGVVVVASVAALTLKRANS |
| | (Os12g0105375) | CGGCAGCAAAGATGGCCAAGCAAGGAAAAGAAAGGATAAAACTCGTTACTCTGAACATGGGGAGAAAG | GSKDGQARKRKDKTRYSEHGEKE |
| | | AAGAAGAGAAGGAAGAGGTTAAAACAATCAGCGGCATAATCAATTCAGCTCTTTCAGATGATGACGAC | EEKEEVKTISGIINSALSDDDDM |
| | | ATGCTCTCCGAGATCGAGAGCCTCCTATCAGGGGAGATCGACATCCCCCTACCAAGTGACAGGTTCGA | LSEIESLLSGEIDIPLPSDRFDV |
| | | CGTCAAAGAACGCTCTCGGTACAACAGTGTTAACTCCGAGCTGGAGAGGCTGCGTGGACTTGTGCGTG | KERSRYNSVNSELERLRGLVREL |
| | | AGCTGGAGGAGAGGGAGGTGAAGCTTGAGGGAGAGCTGCTGGAGTACTATGGCCTCAAGGAACAGGAG | EEREVKLEGELLEYYGLKEQETD |
| | | ACTGATGTTGTAGAGCTACACAGACAGCTCAAGATCAAGATGGTGGAGATCGACATGCTCAAAATGAC | VVELHRQLKIKMVEIDMLKMTIN |
| | | CATCAACTCGCTGCAAGAGGAGAGGAAGAAGCTGCAGGATGACGTCGCCCGTGGCACAGGAGCCAAGA | SLQEERKKLQDDVARGTGAKREL |
| | | GGGAGCTGGAGGCTGCGAGGAACAAGATCAAGGAGCTGCAGCGACAGATACAGATGGAGGCGAACCAG | EAARNKIKELQRQIQMEANQTKG |
| | | ACGAAAGGGCAGCTGATGCTTCTAAAGAACCAGGTGATCGCGCTGAAGTCCAAGGAGGAGGAGGCAGC | QLMLLKNQVIALKSKEEEAAVKD |
| | | CGTCAAGGACGCAGAGGTGCAGAGGAAGCTGAAGAAGCTCAAGGAGCTGGAAGTGGAGGTAGTTGAGC | AEVQRKLKKLKELEVEVVELRRK |
| | | TGAGGAGGAAGAACAAGGAGCTCTTGTATGAGAAAAGGGATCTCATCGTTAAGCTGGATGCAGCACAA | NKELLYEKRDLIVKLDAAQGKIT |
| | | GGAAAAATAACAGAGAGTGATGTAGTTTCCCATGCAAGGGAGGAGATCAACAAGCTGAGGCATGCAAA | ESDVVSHAREEINKLRHANEDLT |
| | | TGAAGACCTTACCAAGCAAGTAGAAGGCCTACAAATGAACAGATTCAGTGAAGTAGAAGAGTTGGTTT | KQVEGLQMNRFSEVEELVYLRWV |
| | | ACCTGCGTTGGGTTAATGCTTGTCTGAGATATGAGCTCCGCAACTACCAGGCACCGTCTGAGAAAATT | NACLRYELRNYQAPSEKISARDL |
| | | TCTGCTCGTGACCTTAACAAGACCCTGAGCCCAAAATCGCGTGAGAGGGCCAAACTTCTAATGCTGGA | NKTLSPKSRERAKLLMLEYAGSE |
| | | ATATGCAGGATCAGAACGAGGACAGGGCGACACTGACCTTGAAACTGCTTCTTCTGCACCTTCTTCAC | RGQGDTDLETASSAPSSPRSEDF |
| | | CCAGAAGTGAAGACTTCGACAATGTTTCAGTTGACAGTTCTTCTAGCAGATACAGCTTCTTTGGCAAA | DNVSVDSSSSRYSFFGKRPNLMQ |
| | | AGGCCCAATCTGATGCAAAAGCTCAAGAAGTGGGGAAGGGGCAAGGATGACGGAAGCAGCTTAGCTTC | KLKKWGRGKDDGSSLASPTQSFT |
| | | ACCGACACAGTCCTTCACTAGTGACTCCCCAAAGAGTACCAGCCAGAAACCAAAGGGGCCCCTAGAGG | SDSPKSTSQKPKGPLEALMLRNA |
| | | CTCTCATGCTCAGAAATGCAGGAGATGGTGTGGGCATTACAACCTTTGGAAAGAGGGAACAAGACCCC | GDGVGITTFGKREQDPSDIMDEA |
| | | AGTGATATCATGGATGAGGCAAATGTTGCATCTTCATTCCATTTGATGTCAAAGACTGTACAAGGTTT | NVASSFHLMSKTVQGFADDKYPA |
| | | TGCTGATGACAAGTACCCCGCTTACAAAGATAGGCATAAACTCGCCACAGAACGGGAGAAGGCAATAA | YKDRHKLATEREKAIKEKAEKAR |
| | | AAGAGAAGGCCGAGAAAGCTAGGGTACAAAGATATGGCGGTGTCAACAGTTCAGGTATTGTGCCATCT | VQRYGGVNSSGIVPSPRSALPPK |
| | | CCAAGATCTGCACTCCCTCCAAAACTTGCTCAAATAAAGGAGAAGGCTTCTACAGCTAATGCTGAATC | LAQIKEKASTANAESSDQPSDNQ |
| | | CAGTGACCAACCTAGTGATAACCAGAACAACCCTCTAGTTGTGACACAACTGAAACTTGCAAATATTG | NNPLVVTQLKLANIEKRAPRVPR |
| | | AGAAGAGAGCTCCAAGAGTTCCTAGGCCACCTCCTGCACCATCAGCCACTGCCACAGGAGCTGCCAAC | PPPAPSATATGAANTASALPPPP |
| | | ACTGCAAGTGCGTTACCTCCACCACCGCCACGCCCTCCAGGTGCACCTCCTCCACCACCGCCTCCTGG | PRPPGAPPPPPPPGKPGGPPPPP |
| | | CAAACCTGGTGGCCCGCCACCACCGCCACCACCCCCTGGTTCCCTACCTAGGAATCTTGCTGGTGGTG | PPPGSLPRNLAGGDKVHRAPEVV |
| | | ACAAGGTACACCGTGCTCCAGAGGTTGTAGAGTTTTATCAAAGTCTCATGAAGCGTGAAGCCAAGAAG | EFYQSLMKREAKKDTTSLGSTTS |
| | | GACACAACTTCTCTGGGATCAACAACATCAAGTGTCTCTGATGTGAGAAGCAACATGATTGGAGAGAT | SVSDVRSNMIGEIENRSTFLLAV |
| | | TGAGAATAGATCAACATTCCTCTTAGCTGTCAAAGCGGATGTGGAGACACAAGGAGACTTTGTTGAGT | KADVETQGDFVESLANEVRAASF |
| | | CTCTAGCAAATGAGGTCCGAGCAGCTAGTTTTGTAAATATCGACGACGTTGTTGCATTTGTAAATTGG | VNIDDVVAFVNWLDEELSFLVDE |
| | | CTTGATGAGGAACTATCCTTCTTGGTCGATGAGCGGGCAGTACTAAAGCACTTTGATTGGCCAGAGAG | RAVLKHFDWPESKTDALREAAFE |
| | | CAAAACTGATGCACTAAGAGAGGCAGCCTTTGAGTATCAAGACCTGCTAAAATTAGAACACAAGGTTT | YQDLLKLEHKVSSFTDDPKLACE |
| | | CATCGTTTACTGATGATCCAAAGCTAGCATGTGAAGAAGCTCTCAAGAAGATGTATTCCTTGCTTGAA | EALKKMYSLLEKVEQSVYALLRT |
| | | AAAGTGGAGCAGAGTGTTTATGCGCTACTTCGTACTAGAGACATGGCCATATCACGCTACAGGGAGTA | RDMAISRYREYGIPVDWLSDSGV |
| | | CGGAATACCGGTGGATTGGCTGTCTGATTCCGGGGTAGTTGGCAAGATCAAATTGGCATCTGTTCAGC | VGKIKLASVQLAKKYMKRVATEL |
| | | TGGCGAAGAAGTATATGAAGAGGGTTGCCACAGAGCTTGATGCCTTGCAAGGCACCGAGAAAGAGCCC | DALQGTEKEPNREFLLLQGVRFA |
| | | AACAGAGAGTTCTTGCTTCTTCAGGGTGTGAGATTTGCTTTCCGAGTTCATCAGTTTGCTGGAGGGTT | FRVHQFAGGFDEESMKAFEELRS |
| | | CGATGAGGAAAGCATGAAGGCATTTGAAGAGCTAAGAAGCAAGATGTCTACACAGACATCTGCTCCAC | KMSTQTSAPQISDV* |
| | | AAATTTCCGATGTGTAG SEQ ID NO: 275 | SEQ ID NO: 276 |
| 139 | Xa21_Os11g0213800 | ATGGCGGTGGCGGAAGTCGGGGGAATGCTTGCATCTGCCGTCCTCAAGGTGGCGACCCAGAAGCTGGG | MAVAEVGGMLASAVLKVATQKLG |
| | | CGCCACCATAGCGGGCCGGGTCATGCTCCAGTGGAACTTCGACAAGGATCTGGAGGGGATGAAGGCCA | ATIAGRVMLQWNFDKDLEGMKAT |
| | | CGCTGGAGTCTGTGGACGCGGTGCTCAGGGACGCCGAGAGGCGGTCGATCCGCGACGCGGCGGTGCGG | LESVDAVLRDAERRSIRDAAVRL |
| | | CTGTGGCTGAGGAGGCTCAAGGACGCCGCCTACGACATCTCCGACATGCTCGACGACCTGGAGGCCAT | WLRRLKDAAYDISDMLDDLEAIT |
| | | CACTTCCAAATCGGATGCGGGGAAGTTGGGATGTATGATGATCCCCAATCTGACTATTGCTCACAAGA | SKSDAGKLGCMMIPNLTIAHKIT |
| | | TTACCCTAGCTAATAAGATGAAGACGATAAGTGATGAACTGAAGGAGATCACTAATCAACATCTTAGC | LANKMKTISDELKEITNQHLSFR |
| | | TTCAGATTCACGGAAGATAGCAGCTATAAGGAGCACAGAGTTACTGATAAACGGGAAACATCGTCCAA | FTEDSSYKEHRVTDKRETSSKVE |
| | | GGTGGAAGAAGCACGAGTTGTTGGGAGGACTGCAGAGAAGCGGATAATTATATCTTCTCTGTCCAAGA | EARVVGRTAEKRIIISSLSKRMT |
| | | GAATGACTGAAGAGACCATAATCCTTCCTATATATGGCATTGGAGGCATAGGCAAGACAACCTTGGCG | EETIILPIYGIGGIGKTTLAKLV |
| | | AAACTGGTTTTCAACGCTTCCAAATTCAGAGACTACTCTAAGGTCTGGATATATGTGTCTCAGACATT | FNASKFRDYSKVWIYVSQTFDLN |
| | | TGACTTGAACAAAATTAGCAACTCTATAATTTCACAAGTATCGGAAAGTGAGAGCCAGTTGACTGAAA | KISNSIISQVSESESQLTEREMI |
| | | GGGAGATGATAAATAGGCGTCTTGATGAGCTACTTTCCGGTAAGAAGATTCTAATTGTTTTAGATGAC | NRRLDELLSGKKILIVLDDLWER |
| | | CTATGGGAGAGGGATCAATTTCAGTTAGATGATTTGAAGACTATGTTAAAGGTTGGCAGGGGCAGCAG | DQFQLDDLKTMLKVGRGSRVIAI |
| | | GGTGATTGCCATCGTAACCACCCGAGATAAGGACATTGCAGAGAAGATTTGCACCACTGAACCGTACA | VTTRDKDIAEKICTTEPYKLEPL |
| | | AACTAGAACCCCTGACAGATGACATGTGCTGGAAAATAATAAAAGAAAAGAGTGTCTTTGAAGCAAGA | TDDMCWKIIKEKSVFEARDDKEQ |
| | | GATGACAAAGAACAATTGGAGAATATAGGAAGGGAAATAGCATCTAAGTGTGGAGGTGTGGCTTTAGC | LENIGREIASKCGGVALAAKSLG |
| | | AGCCAAATCACTTGGATATACTCTGCAACCCATGAAGTTTGATGAATGGGTATCAGTGAGAAACAACG | YTLQPMKFDEWVSVRNNDIWKAS |
| | | ATATCTGGAAGGCATCTACTTTCGAATGTACATCTTTGCCATATCATAATGTGCTTGCATCCTTGCAA | TFECTSLPYHNVLASLQLSCSNM |
| | | TTGAGCTGCAGCAATATGCCTCCAAACCTGAGGTTATGCTTTGCATATTGTGCAATCTTTCCAAAAGG | PPNLRLCFAYCAIFPKGHIIVKD |
| | | TCACATCATAGTAAAAGACCAAATAATTCACCAATGGAATGCTCTTGGTTTCATAGAGCAATCTGACA | QIIHQWNALGFIEQSDIFSTRQL |
| | | TATTCTCTACTAGGCAGCTTGGTGAGGCATATGTTAGACAGCTTTTGGGGTTGTGCTTCCTTCAACAA | GEAYVRQLLGLCFLQQTKAPSVS |
| | | ACAAAGGCTCCTTCAGTGAGTTTCTACTTACCACATGCATCTATAGCTGAACAGCTTTATCATTTCTT | FYLPHASIAEQLYHFFISL* |
| | | TATTAGCCTATAG SEQ ID NO: 277 | SEQ ID NO: 278 |
| 140 | Xa21_OsI_00118 | ATGCACCCGAAGCGTCCGCTGCCGGCACAGGCGCCACCAGCTGGGCTCGTCCTGGTGCCCGCGCCCAA | MHPKRPLPAQAPPAGLVLVPAPK |
| | (Os11g0669100) | GCGCCCGCATGTGGATGCTGCTGCCGGCGGCGGCGTGGCGTCGCCGCGGGGGAAGCGGCAGCTTCGCT | RPHVDAAAGGGVASPRGKRQLRS |
| | | CCGGCATGCTCGTCCTCTTCTTCGTCGCGCAAGTCAAGGAGGAGATGAGATACAACCAGCGACTTCGT | GMLVLFFVAQVKEEMRYNQRLRR |
| | | CGAGTGATACGTGGAGAGAATGCTATTTCCCAGCAAAGGGCAATCCAAGCATTTGATTGTGTCTTTCA | VIRGENAISQQRAIQAFDCVFQK |
| | | GAAAGCATTTGACAATGCCTTCCAGAAGCATCTTGATCCGATTTACCGCTCCCTTCAATCCCTTAACA | AFDNAFQKHLDPIYRSLQSLNKR |
| | | AGCGCACTGATATTCTCAGCCATGAAGTGGAACAAATCAAACATTCAAATTCTAACCATCATGCTAAT | TDILSHEVEQIKHSNSNHHANQQ |
| | | CAGCAATACAGATCAAAGGTAAATCAAGAGTCTGCTGCCATCACTGAGGAAGTGAATCAAGAACAAAC | YRSKVNQESAAITEEVNQEQTAA |
| | | AGCTGCTAGATTTGTCGCGCGTGAAGCTCAGGAGGGGCAAAGAGTTGAGTTGAGGTTCCTCAATAAGT | RFVAREAQEGQRVELRFLNKLNP |
| | | TGAACCCTCTCGTTTTTACAAAGGAAAAAATTACAGCGGAGGATGGTACAACTATCAAAATTGCCATA | LVFTKEKITAEDGTTIKIAIVRD |
| | | GTTAGGGATAATCAGATAATTACATCTGGTCCACTTTCTTCTGCAAGAATTGAAATTTTGGCTCTCCA | NQIITSGPLSSARIEILALHGNF |
| | | TGGTAACTTTTATGATGTTGTGCCTGATAATTGGACCGAATCTGAGTTTGATCACCGCATAGTAAGTA | YDVVPDNWTESEFDHRIVSSSQG |
| | | GTTCACAAGGGCCCGCGTTAGGAGGAGTTTGTCAGGTCAAGCTGAAGAATGGGGAGGCCTCTCCTTCT | PALGGVCQVKLKNGEASPSDVFF |
| | | GATGTATTTTTCAATATACCATCTTCGAAGACTGAAAGTGGAAGGCTCATTCTAGCAGCAAAAGTTCA | NIPSSKTESGRLILAAKVHTSDN |
| | | TACAAGTGACAATGGTGGGTTTCGAATTAAGGAAGCTGTGATGATGAATCCTGTTGTGGTGCAGGTTT | GGFRIKEAVMMNPVVVQVYRNKL |
| | | ACCGAAACAAACTAAATAGAAGTAGTGACCGTCCGAAGCTAAAAGATGAAGTACATCGTTTAAAGGGA | NRSSDRPKLKDEVHRLKGISGKG |
| | | ATTTCAGGAAAGGGATGCCGCACCAAATGGCTTAAAGATAATCAAATCAACACTGTGGAAGAGTTCGT | CRTKWLKDNQINTVEEFVKALNK |
| | | AAAGGCTTTAAATAAGGATGAAGAAAAGATCCGCAATGAGTGTTTCAAGCTAAAGAAGGATAATAAGC | DEEKIRNECFKLKKDNKLWKDTI |
| | | TTTGGAAAGATACAATTAAACATGCTAAAGAGTGTGATCTTGAAGGGAATTGCAAGCTGAAATTATAT | KHAKECDLEGNCKLKLYRAEEQH |
| | | AGAGCTGAAGAGCAGCATGTTGTACTCTTCTTTAACTGCGTGCATGACCTCGTTGGTGCGAAATTTCG | VVLFFNCVHDLVGAKFRDHYVAK |
| | | TGATCACTATGTTGCAAAGGACAATTTCAGTTCAGATCAACAGGATGCAGTGAATCGTTTGAAGAAAC | DNFSSDQQDAVNRLKKQAYDELD |
| | | AAGCATATGATGAGCTGGATAGCATTGGCTTTGATCACGAAATGAAAAATAACTATCCGGTGATGACG | SIGFDHEMKNNYPVMTLSDDAYI |
| | | CTCAGTGATGATGCTTACATTCCCTTCACTGACACAGCACAAAATCCTCCAGATTTGCATGTTACATT | PFTDTAQNPPDLHVTFQVQGIAA |
| | | TCAAGTTCAAGGTATTGCAGCAGCTGAGATTTATCATGAACATGAACTGCCTCAAGCATTTCCTAACA | AEIYHEHELPQAFPNNNNDFGQD |
| | | ACAATAATGATTTTGGACAAGACTTTTTACATGGCTTTCAAGGTGCTCTGACTCAGATGGACCATGAC | FLHGFQGALTQMDHDYAQFGIAD |
| | | TATGCCCAATTTGGCATTGCTGATATGCAGTGTTATACTACACGGGCACCTGAAGGTACCTCTTATGG | MQCYTTRAPEGTSYGGNNMIGPA |
| | | AGGCAACAACATGATCGGACCAGCAAATGTACCGCAGAATGTTATTGGTGACGGCTCTATGGACATGT | NVPQNVIGDGSMDMFDCYAYIVP |
| | | TTGACTGTTATGCATACATCGTTCCGGACAATGAGAACCAGAATGAGAGGCCTCATAGCTCTGCATAT | DNENQNERPHSSAYPGPV* |
| | | CCAGGACCAGTTTAA SEQ ID NO: 279 | SEQ ID NO: 280 |
| 141 | Xa21_Os09g0425900 | ATGGCGTTCCGGCTGAGCAACAGCCTGCTCGGGATCCTGAACGCGGTGACGTTCCTCCTGTCGGTGCC | MAFRLSNSLLGILNAVTFLLSVP |
| | | CGTGCTGGGCGGCGGCATCTGGCTGGCGACGCGCGCCGACGGCACGGAGTGCGAGCGCTACTTCTCGG | VLGGGIWLATRADGTECERYFSA |
| | | CGCCGGTGATCGCGTTCGGGGTGTTCCTCCTCCTCGTCTCCCTGGCGGGCCTCGTCGGCGCCTGCTGC | PVIAFGVFLLLVSLAGLVGACCR |
| | | CGCGTCAACTGCCTCCTCTGGTTCTACCTCGTCGCCATGTTCGTCCTCATCGTCGTCCTCTTCTGCTT | VNCLLWFYLVAMFVLIVVLFCFT |
| | | CACCGTCTTCGCCTTCGTCGTCACCAACAAGGGCGCCGGCGAGGCCGTCTCCGGCAGAGGGTACAAGG | VFAFVVTNKGAGEAVSGRGYKEY |
| | | AGTACAGGCTCGGCGACTACTCCAACTGGCTGCAGAAGCGGATGGAGAACAGCAAGAACTGGAACAGG | RLGDYSNWLQKRMENSKNWNRIR |
| | | ATCAGGAGCTGCCTCCAGGACTCCAAGGTCTGCAAGAAACTGCAGGACAAGAACTGGGATCGGACCCA | SCLQDSKVCKKLQDKNWDRTQFF |
| | | GTTCTTCAAAGCCGACCTCTCCCCGCTCGAGTCCGGATGCTGCAAGCCACCCAGCAGCTGCAACTTCC | KADLSPLESGCCKPPSSCNFLYV |
| | | TCTACGTCAGCGGCACGAACTGGACGAAGGTGCCCACCAACTCGTCGGACCCGGACTGCAACACGTGG | SGTNWTKVPTNSSDPDCNTWVDD |
| | | GTCGACGACGGCACGCAGCTGTGCTACAACTGCCAGTCGTGCAAGGCCGGCGCGGTGGCGACCCTGAA | GTQLCYNCQSCKAGAVATLKRDW |
| | | GCGGGACTGGAAGCGCGTCGCCGTCGTCTGCATCGTCTTCCTCGTCTTCATCGTCATCGTCTACTCCC | KRVAVVCIVFLVFIVIVYSLGCC |
| | | TCGGCTGCTGCGCGTTCAGGAACAACCGGAGGGACAACCGCGGCGCCTACCGCGGTGCCGCGTGGAAG | AFRNNRRDNRGAYRGAAWKGGYA |
| | | GGCGGATACGCCTGA SEQ ID NO: 281 | * SEQ ID NO: 282 |
| 142 | Xa21_Os09g0456800 | ATGGCTGCTGCTGAGGCGGCGGCGGCGGCGGCGGTGGGGAAGCAGCAGCAGAAGGGCGGCGGGGGAAG | MAAAEAAAAAAVGKQQQKGGGGR |
| | | GGGAGGAGGCGGCGGCGGGCCGGCGCCGTTCCTGACGAAGACGCACCAGATGGTGGAGGAGAGCGCGA | GGGGGGPAPFLTKTHQMVEESAT |
| | | CGGACGAGGTGATCTCGTGGGGAAAGGAGGGGCGGTCGTTCGTGGTGTGGAAGCCGGTGGAGTTCGCC | DEVISWGKEGRSFVVWKPVEFAR |
| | | CGCGACCTCCTCCCGCTCCACTTCAAGCACTGCAACTTCTCCTCCTTCGTCCGCCAGCTCAACACCTA | DLLPLHFKHCNFSSFVRQLNTYG |
| | | CGGTTTCCGGAAGGTGGTGCCCGATCGGTGGGAGTTCGCGAACGGCAACTTCCGGCGAGGCGAGCAAG | FRKVVPDRWEFANGNFRRGEQGL |
| | | GCCTCCTCTCCGGCATCCGCCGCCGCAAGGCGACGACGCCTCAGTCCTCCAAATCCTGCGGCAGCGGC | LSGIRRRKATTPQSSKSCGSGVN |
| | | GTCAACGTCGCGTTCCCTCCGCCGCTGCCCCCTCTGCCCCCGGCGCCGTCGGCGACCACGTCCAGCGG | VAFPPPLPPLPPAPSATTSSGND |
| | | CAACGACCGCAGCTCCTCCTCCGCGTCCTCGCCGCCGCGGGCGGACATCACCAGCGAGAACGAGCAGC | RSSSSASSPPRADITSENEQLRK |
| | | TCAGGAAGGACAACCAAACGCTGACGACGGAGCTGGCGCGGGCTCGGCGGCACTGCGAGGAGCTTCTG | DNQTLTTELARARRHCEELLGFL |
| | | GGCTTCCTGTCGCGCTTCCTCGACGTCCGGCAGCTCGATCTCCGGCTGCTCATGCAGGAAGACATGCG | SRFLDVRQLDLRLLMQEDMRAAA |
| | | AGCGGCGGCCGCCGGAGGCGGCGGCGGCGAGCAGCGCGAGCAAGAGCACGCCCGGGAGGAGAAGTGCG | AGGGGGEQREQEHAREEKCVKLF |
| | | TGAAGCTGTTCGGCGTGCTCCTCGACGACACCCATGGCGCCGCCACGAGGAAGAGGGCGCGGTGCGAG | GVLLDDTHGAATRKRARCEEAAA |
| | | GAGGCAGCGGCCAGCGAGCGGCCGATCAAGATGATCAGGATCGGCGAGCCGTGGGTCAGCGTTCCGTC | SERPIKMIRIGEPWVSVPSSGPA |
| | | GTCGGGGCCGGCGCGGTGTGGCGGCGACAACTGA SEQ ID NO: 283 | RCGGDN* SEQ ID NO: 284 |
| 143 | Xa21_Os01g0949500 | ATGGTCAAGATCAAGATGCCCGCCCTGTTCCGCCGCCGGAGCGGCTCCAAGTCGCCGCCGCTGCCGCA | MVKIKMPALFRRRSGSKSPPLPQ |
| | | GGCCGACCCGGCGTCCGGCGGCGGGTCCCCGGCGCCGACGCCGGAGGAGGAGATGGAGCGGGTGTTCC | ADPASGGGSPAPTPEEEMERVFR |
| | | GCAAGTTCGACGCCAACGGCGACGGCCGGATCTCGCGGTCCGAGCTCGGCGCGCTGTTCGAGAGCCTC | KFDANGDGRISRSELGALFESLG |
| | | GGCCACGCGGCCACCGACGACGAGCTCGCCCGCATGATGGCCGAGGCGGACGCCGACGGCGACGGCTT | HAATDDELARMMAEADADGDGFI |
| | | CATCAGCCTCGACGAGTTCGCCGCCCTCAACGCCACCGCCAGCGGCGACGCGGCCGCCGTCGAGGAGG | SLDEFAALNATASGDAAAVEEDL |
| | | ACCTCCGCCACGCCTTCCGCGTCTTCGATGCCGACGGCAACGGCACCATCTCCGCCGCCGAGCTCGCC | RHAFRVFDADGNGTISAAELARV |
| | | CGCGTCCTCCACGGCCTCGGCGAGAAGGCCACCGTCCAGCAGTGCCGCCGCATGATCGAGGGCGTCGA | LHGLGEKATVQQCRRMIEGVDQN |
| | | CCAGAACGGCGACGGCCTCATCTCCTTCGAGGAATTCAAGGTCATGATGGCCGGAGGCGGCTCCTTCG | GDGLISFEEFKVMMAGGGSFAKI |
| | | CCAAGATCGCCTAG SEQ ID NO: 285 | A* SEQ ID NO: 286 |
| 144 | Xa21_Os05g0494600 | ATGAGTATGAGGCGGTTGAGCGGCAGCGGCAATGCCGGCGGCGGCGCGGCGGTGGCCGGAGAGTGGGA | MSMRRLSGSGNAGGGAAVAGEWD |
| | | TGGTGGTGGTGGTGGTGGCATTGCGGGGAGGATGAGGGGGGTGAACGCCGGGATCATGGACGAGAAGG | GGGGGGIAGRMRGVNAGIMDEKV |
| | | TGCTGGAGCTGGTGTTCCGGGCGCTGAACTGGGACCCGAGGGAGCTGTGCGTGGTGGCGAGGGTGAGC | LELVFRALNWDPRELCVVARVSR |
| | | CGGCGGCTGCGGGCGGTGGCGGAGCGGGTGCTGTGGCGGGAGCTGTGCGTGTCGAGGGCGCCGCGGAT | RLRAVAERVLWRELCVSRAPRMV |
| | | GGTGTCGGCGCTGTCGGGCCCGACCGCGGCGGTGGCGGCGGCGGCAGGGCGCATCGGGGGAGGCTGGC | SALSGPTAAVAAAAGRIGGGWPA |
| | | CGGCGATGGCGAAGCTGCTCTTCTTCTGCTGCGGCGCGGCGGGCGCCGCCGTGCCGGGCCACTTCGCG | MAKLLFFCCGAAGAAVPGHFAPV |
| | | CCCGTGTCGCGGTTCTCCAAGACGTCGGGCCGGAGCTTCCTGTCGCGGCGGTGCGCGGGGGACATGCT | SRFSKTSGRSFLSRRCAGDMLFV |
| | | GTTCGTGTCGGACCCGTGCGAGCACGCCGCCGCCGGCGCCGCGCCCGACGACGTCGTGGGCGCGTACC | SDPCEHAAAGAAPDDVVGAYRGV |
| | | GCGGCGTGTACCGCGGGTTCATGCGGTCGCGGACGCGCGCCTTCCTCGTCGGCCACCGCGCCCCGCTC | YRGFMRSRTRAFLVGHRAPLEPR |
| | | GAGCCGCGCGTCCGCTGCCCCTACTGCGGCGCCCGCGTGTGGAGCATGACCGCCGCGGGGCTCGCGCC | VRCPYCGARVWSMTAAGLAPRSA |
| | | GCGCAGCGCGAGCCGCCGCCTCGGCGCCAACGAGGGCCGCCTCGAGTACTTCGTCTGCGTCAGCGGCC | SRRLGANEGRLEYFVCVSGHLHG |
| | | ACCTCCACGGCAGCTGCTGGCTCGCCCGCCTCTCCTCCTCCTCCTCCTCCAGCGACGGCGAGCGCAGC | SCWLARLSSSSSSSDGERSADSD |
| | | GCCGACTCCGACTCCAACCACAGCGACGACGAGACGTTCGCCGCCGCCGACGTGAGCCTCCCGCTTCC | SNHSDDETFAAADVSLPLPPAGR |
| | | TCCAGCCGGCCGCGTGTCAGCCCGGCGCCTTCGAGGCAGGCCCGCCATGTGA | VSARRLRGRPAM* |
| | | SEQ ID NO: 287 | SEQ ID NO: 288 |
| 145 | Xa21_Os05g0560600 | ATGGAGGTGAGGGAGATGGCCGTGGCGGCGGCTGCGGCGGCGGCGGCGTCGTCAGGGGGAGGAGGTGG | MEVREMAVAAAAAAAASSGGGGG |
| | | GGGGTTGAGGATGCCGCCGCCCAACCCTAACCTGCCGTACAGGGAGGATTGCTGGAGCGAGGGCGAGA | GLRMPPPNPNLPYREDCWSEGET |
| | | CGGAGGCGCTGGTCCGCGCGTGGGGGAGCCGCTACGTCGAGCTCAACCGGGGGAACCTGCGGCAGAAG | EALVRAWGSRYVELNRGNLRQKQ |
| | | CAGTGGCAGGAGGTGGCCGACGCCGTCAACTCGCGGCGCGGGGCGGCCGCGCGCCGCCGCCCGCCGCG | WQEVADAVNSRRGAAARRRPPRT |
| | | CACCGACGTGCAGTGCAAGAACCGCGTCGACACCCTCAAGAAGAAGTACAAGGCGGAGCGCGCCCGCG | DVQCKNRVDTLKKKYKAERARVM |
| | | TCATGCCATCCACCTGGTCCTTCTTCCCCGAGCTCGACCGCCTCGTCGGGCCCACCCTCTCCGCCTCC | PSTWSFFPELDRLVGPTLSASAS |
| | | GCCTCCAAGAGGCCCTCGCCGTCGCCGTCGCCGGTGCCGCCGCCCCCTCACTTCGCCATGCCCATCCA | KRPSPSPSPVPPPPHFAMPIHPS |
| | | TCCTTCCGCGGTGAGGAAGCCCCCCTCGCCTTCGCCGTCGCCCTCTCCGCCGCCTCCCATGGCGTTGC | AVRKPPSPSPSPSPPPPMALPLP |
| | | CGCTGCCCAGCTACCGTCGCGGGTCTCCGCTCCCCGCCGCCGCTCTTATCCAGCAAGAGGCCGCGGCT | SYRRGSPLPAAALIQQEAAAAAA |
| | | GCAGCCGCTGCCGCGGTGTCTGATTCTGAGGACTCTGAAGGCCCTGGTGACAACAACAATCACAACGC | AAVSDSEDSEGPGDNNNHNAQRS |
| | | GCAGCGGTCACCGTCGCAATCTGTGTCATCGCGCTCCGGCAATAGCAACAAGCGCAGCCGCCAGGAAG | PSQSVSSRSGNSNKRSRQEVDGG |
| | | TTGATGGTGGTTTCAGGGAGCTGGCAAGGGCGATCGAGGCATTTGCGGAGATGTATGAGCGTGTGGAG | FRELARAIEAFAEMYERVESAKQ |
| | | AGTGCGAAGCAAAAGCAGGCGCTGGAGATTGAGCGGCAGCGAATAGACTTCCTGAAGCAGTTGGAGGT | KQALEIERQRIDFLKQLEVKRME |
| | | CAAGCGCATGGAGAACTTTGTGGATGCACATGTCAAGCTTGCCAGGGCAAAGCGCATCAAGAAGCATG | NFVDAHVKLARAKRIKKHAGTAP |
| | | CAGGGACTGCACCCGATGGTATTGGCGCAGCGGAATTGGTTTCCTCTGTCGCTGCGCTGCCTTTCCTC | DGIGAAELVSSVAALPFLSTSTY |
| | | TCCACCTCCACCTACATATGA SEQ ID NO: 289 | I* SEQ ID NO: 290 |
| 146 | Xa21_Os09g0526500 | ATGGCGTCGAGGACGATGACACTGGAGGTGACGGTGGTGTCCGCCGAGGAGGTCGTGCTGCCGCCGAC | MASRTMTLEVTVVSAEEVVLPPT |
| | | GAGGCGCCCGCTCGGCCGCGGCGCGTACGCGGTGGTGCGCACGGCGGCGTCGGCGTCGTCGCCGGCGG | RRPLGRGAYAVVRTAASASSPAA |
| | | CGGCGGTGTGCACGCGCGTCGACGAGGAATCGGGCGGCGACTGCAACGGGTACCCCTACTGGAAGGAG | AVCTRVDEESGGDCNGYPYWKEA |
| | | GCGCTGCGGGTGGCGTTGCCGGAGGGGGCGCGCTGGCTGGACGTCGAGATCTGCCGGAGGAGGCCGAA | LRVALPEGARWLDVEICRRRPNG |
| | | CGGCCAGGTGGAGGCGGTGGCGGCGGCGAGCGTCCCCGTCGGCGACTTCACCGTCGGCCCGCCGGGCC | QVEAVAAASVPVGDFTVGPPGHL |
| | | ACCTGCATTGCCTCAGCTACAGGCTGTTCGACGCCTCCGGGTGCAGGACGCGCCGCAACGGCATCGTC | HCLSYRLFDASGCRTRRNGIVNI |
| | | AACATCACCGTCAGGAGGACGGACGTCAAGTACACCGCGCCGCCTCCCCCGCCGCCGCCGGTGAAAGC | TVRRTDVKYTAPPPPPPPVKAPA |
| | | TCCGGCGTACTCCGGCGCGAGCGGGAGCGGCGGCTCTTGCTACGGCGTGCCGCCGGCGGGCGCGGCCA | YSGASGSGGSCYGVPPAGAAMGF |
| | | TGGGTTTCCCCGTCGGATTCACGGCCAATGGCAAGGCCTGCGCGTAG | PVGFTANGKACA* |
| | | SEQ ID NO: 291 | SEQ ID NO: 292 |
| 147 | Xa21_Os01g0373700 | ATGGGAGGCAAGAAGAGGAAATCCGGCTCCAGTTTGTGGTTGGCCGTGGCGTCTTGGTTCGCGCGATT | MGGKKRKSGSSLWLAVASWFARL |
| | | GGGCTCAAAGATGGTGGCGAGCTCTGGCTCCGCCGGTGGCCGCGCAGGGTATGATGCGGCTGGCGAGA | GSKMVASSGSAGGRAGYDAAGEM |
| | | TGGTCAGGGCGGCTAAACATTTCTCCAGCGCTCACAAGATAAACTTTGGTTGA | VRAAKHFSSAHKINFG* |
| | | SEQ ID NO: 293 | SEQ ID NO: 294 |
| 148 | Xa21_OsI_17083 | ATGACGCTTCTAGCATATTCTTCCGGAAATTTCTGGAGATCTCGTCCATCTCCCACAAGCCGAACGCA | MTLLAYSSGNFWRSRPSPTSRTQ |
| | | ATCTGCTCGTTCGTTCCTCGCTTCTGGGACTACGGAACTCGGATTCGAGGCATCCTGCGCAACTTACA | SARSFLASGTTELGFEASCATYK |
| | | AGTTACAAGTTACAAATCAAGGGATTCAAGATACAGGCATCGAATTACCATTACCAATGAAAGGAGCC | LQVTNQGIQDTGIELPLPMKGAA |
| | | GCAAGGTTTGTGGTGGAAAATGCAACCAGGCAAATCAAACCTGTCAATGGACTTCCGAGGTTGATGAC | RFVVENATRQIKPVNGLPRLMTI |
| | | AATTACTACTCCTCAGAAGCATGGCAAGGAAAATAATTCCAATGATTCAGTGCTCATAAAGGATGAAA | TTPQKHGKENNSNDSVLIKDENI |
| | | ACATCGAGCCACTTGTTGCTTTTAGCAGGCCACCTCCTTTGCCACCAGTTCTTGGCCCCTTGATCATG | EPLVAFSRPPPLPPVLGPLIMLS |
| | | CTCTCACTTTTCAATATGTCAAGCGGCGGTGATGAAAACAAAAAATAA | LFNMSSGGDENKK* |
| | | SEQ ID NO: 295 | SEQ ID NO: 296 |
| 149 | Xa21_OsI_07792 | ATGACCACCTGCCTGCCCCACTTCAAGAGCCTCCTCGCCGGCCTCAACCGCTCGCCCGGCGTCCCGCC | MTTCLPHFKSLLAGLNRSPGVPP |
| | (Os02g0577700) | GGTCACCTGCGTGGTGGCGGACGCCGGCCTCACCTTCGGCGTCGACGCCGCGGAGGCTCTCGGCGTGC | VTCVVADAGLTFGVDAAEALGVP |
| | | CGTGCGCGCTGCTGTGGACGGCCAGCGCCTGCGGCTCGCTCGGCTACCGCCATTACCGCCTCTTCATC | CALLWTASACGSLGYRHYRLFID |
| | | GACAAGGGCCTTGTCCCGCTCAAAGATGCAGAGCAGCTGACGAACGGGTTCCTCGACACGCCGGTGGA | KGLVPLKDAEQLTNGFLDTPVDW |
| | | CTGGGCGTTCGGGATGAGCAAGCACGCGCGGATCGGGGACTTCCCGAGCTTCCTCCGCACGACGGACC | AFGMSKHARIGDFPSFLRTTDRD |
| | | GCGACGACGCCATGCTCAACTACGTGCTGCACGAGACGGACCACATGGCGGACGCGGACGCCATCATC | DAMLNYVLHETDHMADADAIIYN |
| | | TACAACACCTTCGACGAGCTGGAGCAGCCGGCGCTCGACGCCCTGCGCGCCGCACTCCAGCCGGCGGC | TFDELEQPALDALRAALQPAAVY |
| | | CGTCTACACCGTCGGCCCGCTCAACCTGCTCGCCGAGAGCCTCGCGCCATCGGGCGGCGGCGGCGACC | TVGPLNLLAESLAPSGGGGDPLD |
| | | CGCTCGACGCGCTGGGCTCCAACCTCTGGAGAGAGGACGACGCCTGCCTCGTCTGGCTCGACGGCAGG | ALGSNLWREDDACLVWLDGRAPR |
| | | GCGCCCCGGTCCGTGGTGTACGTGAACTACGGGAGCATCGCCGTGATGAGCAACCAGCAGCTGGTGGA | SVVYVNYGSIAVMSNQQLVEFAW |
| | | GTTCGCGTGGGGGCTCGCCGGCAGCGGCTACGCCTTCCTGTGGGTGATCAGGCCAGACCTGGTGACCG | GLAGSGYAFLWVIRPDLVTGNDA |
| | | GCAACGACGCCTCCGCCGCGGCGCTGCCGCCGGAGTTCATGGAGGCGACGAGGGGCAGGGGCCTCCTG | SAAALPPEFMEATRGRGLLASWC |
| | | GCGAGCTGGTGCCCGCAGGAGGCGGTGCTGCGGCACGAGGCGGTGGCGCTGTTCCTGACGCACAGCGG | PQEAVLRHEAVALFLTHSGWNST |
| | | GTGGAACTCGACGCTGGAGAGCCTGTCCGGCGGGGTGCCGATGCTGTCGTGGCCGTTCTTCGCCGAGC | LESLSGGVPMLSWPFFAEQPTNS |
| | | AGCCGACCAACTCCCTGTACAAGCGCGCGGAGTGGGGCGTCGCGATGGACGTCGGCGGCGGCGGCGGC | LYKRAEWGVAMDVGGGGGVRREA |
| | | GTGCGGCGGGAGGCGGTGGAGGCGAGGATACGGGAGGCGATGGGAGGGGAGAAGGGGAGTGCGATGAG | VEARIREAMGGEKGSAMRKRAAE |
| | | GAAGAGGGCGGCGGAGTGGAGTGAGAGCGCCGCGCGAGCAACGCGACTCGGTGGGAGCTCGTTCGGCA | WSESAARATRLGGSSFGNLDSLI |
| | | ACCTGGACTCGCTGATCAAAGATGTGTTGCTCTCTGGCAGGAGGAGTTAG | KDVLLSGRRS* |
| | | SEQ ID NO: 297 | SEQ ID NO: 298 |
| 150 | Xa21_protkinase | ATGCTGCCCTTGCTTTTCTTTCCTGTATTCGTGTTTGCCACAACGCTTCATGGAGCCATCGGCCAAGA | MLPLLFFPVFVFATTLHGAIGQE |
| | | AGCTGGCTTTCTAAGCATCGACTGCGGCCTAGAGGACACCAGCGGCTACAAGGAAGACAAGACTGGCA | AGFLSIDCGLEDTSGYKEDKTGI |
| | | TCATCTACGTCTCCGACGGCTCCTACGTCGATGCCGGGGAGAACCACCGTGTGTCGGCGGAGGAAGAG | IYVSDGSYVDAGENHRVSAEEEN |
| | | AACGCGAAATTGCCACGTCCGTACGCGACGCTCCGGAGCTTCCCTTCCGGCATGCGGAATTGCTACAC | AKLPRPYATLRSFPSGMRNCYTL |
| | | GCTGCCCGCGGACGCTGGGGCCAAGTACCTTGTCCGGGTGGTGTCCTTCTACGGCAACTACGACGGGA | PADAGAKYLVRVVSFYGNYDGKN |
| | | AGAACAGCTCATCGTCGTTGCAGTTCGACCTGCACCTCGGGACAAACTACTGGGCCACTGTCCGCGCT | SSSSLQFDLHLGTNYWATVRADG |
| | | GACGGCAACAACGTGTACGAGGCGCTGTTCGTGGCCTGGGCGAGCTGGGTGCCGGTGTGTCTCGTGAA | NNVYEALFVAWASWVPVCLVNTG |
| | | CACCGGCCGTGGCACGCCGTTCGTGTCCGCGGTGGAGCTGAGGCAGCTCAGCGGCGAGCTCTACCCGG | RGTPFVSAVELRQLSGELYPGLN |
| | | GCCTCAATGCCAGCCAGTCCTTGTCCATGTATGGACGGCGCAACATGGGTTCAAACATTTCATATACA | ASQSLSMYGRRNMGSNISYTRYP |
| | | CGTTACCCCCACGATCGATATGACCGGTACTGGTGGCAGGTATGGTCTGATCCAATGTGGAAGAACAT | HDRYDRYWWQVWSDPMWKNISTP |
| | | TTCCACTCCATCAACCATCGAACAGAGCTCCATCTTCGCTTTGCCCCTCCCCGTTATCCAGACCGCAG | STIEQSSIFALPLPVIQTAVETV |
| | | TTGAGACGGTCAGCAATAAGACAATGCTCAACATTACATGGCAAGCGGAAACACCCCGAGGCTTTTTG | SNKTMLNITWQAETPRGFLVFLH |
| | | GTTTTCTTGCACTTCGCCGACTTCCAGAACAGTCAATTCCGACAGTTCAAGGTCGCTTTTAACAATGA | FADFQNSQFRQFKVAFNNDYRDN |
| | | CTATCGTGATAACTATAGCCCACCATACATGACCACAGATGCCTTGTTTGGCTTGACAAGGGCCACCA | YSPPYMTTDALFGLTRATSGMYS |
| | | GTGGCATGTACAGCATCAGTATTGGAGCCACCGATGCATCTAAGCTGCCGCCGATGCTAAACGCGATT | ISIGATDASKLPPMLNAIEAYTL |
| | | GAGGCATACACTCTCATGTCCCGTGACAACCCAATAACGTTCCCAAACGATTTTGACACTATCATGGC | MSRDNPITFPNDFDTIMAIKHEY |
| | | AATTAAACATGAATACGGGATAAAGAAGAATTGGATGGGTGATCCATGTTTCCCAACACAATTTGCAT | GIKKNWMGDPCFPTQFAWDGVKC |
| | | GGGATGGCGTGAAATGCAACAATGCAAGTGGTAACAATACGAGGATAATATATTTGGATCTCTCGAAC | NNASGNNTRIIYLDLSNNNLHGP |
| | | AACAACTTGCATGGGCCGATATCTAATAACTTTACATTGCTCACGGCACTCAAGTACCTGAATTTGTC | ISNNFTLLTALKYLNLSGNQLNA |
| | | GGGCAACCAGCTGAATGCACCCATTCCTAAGTCCCTCTGTGAAAACAATAATACAGGATCATTGATTC | PIPKSLCENNNTGSLILSFDSDR |
| | | TCAGTTTCGATTCTGACCGAGAAACGTGCACAATAATACCGCCTCCAACAATAAAAAAATTGAACAAA | ETCTIIPPPTIKKLNKAILAISV |
| | | GCAATCTTAGCTATTTCGGTAGTGGTTCCTGTGATGGCCATTGCTATTCTTGTTCTCGCTTATTTGAT | VVPVMAIAILVLAYLIWRQKRKP |
| | | CTGGAGACAGAAAAGAAAACCAAACATATCAATAGATGATACTCCGAGAGAACGACAAGCTGAAAATG | NISIDDTPRERQAENVPASRKNH |
| | | TTCCAGCAAGCAGAAAAAACCATGGGAATGCCTTGCTAATGGTTGAGAATCGCCAATTCACATACAAG | GNALLMVENRQFTYKELEKLTNK |
| | | GAGCTTGAGAAGTTAACTAATAAGTTTGAACGCTTCATTGGACAAGGAGGTTTTGGACTCGTGTACTA | FERFIGQGGFGLVYYGLIEDGIE |
| | | CGGACTTATAGAAGATGGTATTGAGGTTGCTGTCAAGATACGTTCTGAGTCATCGTGTCATGGACTCG | VAVKIRSESSCHGLDEFFAEVQS |
| | | ATGAATTTTTCGCTGAGGTTCAAAGTTTGACAAAGGTGCATCACAGAAATCTAGTTTCCTTGGTTGGT | LTKVHHRNLVSLVGYCWEKNHLA |
| | | TACTGCTGGGAGAAGAATCATTTAGCACTAGTTTATGAGTACATGGCTCGAGGCACTCTTTGTGATCA | LVYEYMARGTLCDHLRGNHGFSE |
| | | TCTGAGAGGTAATCATGGTTTTAGTGAAACCTTGAATTGGAAAACACGAGTCCGAGTTTTGGTTGAAG | TLNWKTRVRVLVEAAQGLDYLHK |
| | | CTGCACAAGGACTGGATTATCTGCATAAAGGTTGTAGTCCGCCAATAATTCACGGAGATGTGAAGACG | GCSPPIIHGDVKTSNILLDQNLQ |
| | | AGTAACATTCTGTTGGATCAAAATTTACAAGCTAAAATTGCAGATTTTGGTCTTTCCAAGACATATCT | AKIADFGLSKTYLSDTQTHISVN |
| | | TAGCGACACACAGACGCACATATCAGTCAATCCAGCTGGGTCAGCTGGTTATATGGACCCTGGGTACT | PAGSAGYMDPGYFHTGRLTESCD |
| | | TTCACACAGGCAGACTCACGGAGAGTTGTGATGTTTATAGTTTTGGAATTGTTCTGTTAGAGATAGCC | VYSFGIVLLEIATGESPILPGQD |
| | | ACCGGCGAGTCTCCCATACTACCAGGTCAAGACCACATTATTCAGCGTGTGAATAAGAAGATTGCTAC | HIIQRVNKKIATGNISLVADARL |
| | | CGGTAATATCAGCTTGGTTGCTGATGCACGACTCAGAGGTGCCTATGATATCAGCTCAATGTGGAAGG | RGAYDISSMWKVVDIGLLCTTDT |
| | | TGGTGGACATCGGACTGTTATGCACTACTGACACTGGTGCAAAAAGGCCGACAATGGCTGCTGTGGTT | GAKRPTMAAVVVRLNESLALEEA |
| | | GTGCGACTCAATGAGAGCCTTGCATTGGAGGAAGCTCATTGCGAGAGTGGCTTCAGGGGAAGCACAGG | HCESGFRGSTGTSCDTTVSTSTF |
| | | CACATCGTGTGATACCACAGTTTCAACATCTACGTTTGGGCCTTCAGCAAGATGA | GPSAR* |
| | | SEQ ID NO: 299 | SEQ ID NO: 300 |

### Example 2

### Estimation of nifH Transcript Abundance

[0169] NifH transcript levels associated with plant roots were assessed from total RNA extracts from plant roots as previously published (Hurek et al., 2002) with improvements (Burbano et al., 2011, supra). In FIG. 1, with similar primers DNA-amplification of nifH fragments was done as in Hurek et al., 2002. For FIG. 2, the amplification of nifH fragments was obtained by universal primer sets in a nested reverse transcription (RT)-PCR approach (Burbano et al., 2011, supra): a nested RT-PCR protocol was used. The RT step was done at 42° C. using the primer nifH3. The PCR amplification was carried out with annealing 55° C. with primers nifH3 and nifH4. The second round of the nested PCR amplification was performed with 1 μl of the first-round product with the primers ZehrF and ZehrR. For this second round, quantitative real-time PCR was applied for quantification (Bio-Rad CFX 96). The actin gene was used to normalize the quantification of nifH expression.

[0170] For the production of in vitro transcribed nifH mRNA as control, a 1172-bp PvuII-EcoRI fragment from plasmid pBGvN322 corresponding to base 262 to 1433 of the Mo-nitrogenase operon of Azoarcus sp. BH72 (GenBank accession AF200742) was subcloned into pBluescript KS (Stratagene) to yield plasmid pBTH2. A 1.2 kb sense transcript was transcribed from the T3 promoter, after truncation with EcoRI. Transcription reactions were carried out as described in B. Reinhold-Hurek, D. A. Shub, Nature 357, 173 (1992).

[0171] In FIG. 2, levels of nifH transcripts in roots are shown. Asian cultivated rice (Oryza sativa) roots showed significantly lower transcript levels than wild rice roots (O. longistaminata). In interspecific hybids (F1) high transcript levels were retained (multiple t tests with multiple comparison post test; *, P<0.05). Values are means with SD from at least 3 replicates. All values from the rice cultivars were compared to those from wild rice. NUN transcripts were quantified by real-time RT-PCR. The actin gene was used to normalize the quantification of nifH expression.

### Example 3

### Determination of Nitrogen Incorporation by ¹⁵N Measurement

[0172] Oryza longistaminata and other plants were grown in a growth chamber as described in L. Miché, F. Battistoni, S. Gemmer, M. Belghazi, B. Reinhold-Hurek, Mol. Plant Microbe Interact. 19, 502 (2006), at 30° C. with a 16 h day/8 h night cycle in pots in water-saturated soil from the Carmague, France, which has been not treated with N fertilizer for 10 years. For ¹⁵N₂ tracer experiments, pots were placed into a gas-tight chamber in a Conviron phytotron, with controlled light, humidity and CO₂ concentration. Immediately before use, ¹⁵N₂ gas (99.30 atom % ¹⁵N; Euriso-top, Gif-Sur-Yvette, France) was successively treated with alkaline permanganate and diluted sulfuric acid to remove possible impurities such as nitrogen oxides and NH₃ as described in R. H. Burris, in: A. Quispel (Ed), The biology of nitrogen fixation, (North Holland Publishing Company, Amsterdam, 1974), pp. 9-23. ¹⁵N % abundance in headspace of the chamber was measured with a Finnigan MAT 8200 mass spectrometer (Finnigan MAT GmbH) at the beginning and at the end of incubation with ¹⁵N-labeled N₂.

[0173] Plants were sampled after the 2^{nd} consecutive cut, after growth under a headspace of 0.41±0.15 atom % ¹⁵N excess. The incorporation of ¹⁵N₂ tracer into re-grown shoots of a wild rice species, F1-hybrids and backcrosses with Oryza sativa was tested. In contrast to the O. sativa cultivar and the backcross tested, two different F1-hybrids retained high N₂-gain potential similar to wild rice (one-way ANOVA and Bonferroni's multiple comparison post test *, P<0.05).

The application's sequence listing, which the Patent Office published only in electronic form, follows.

SEQUENCE LISTING (300 sequences)

SEQ ID NO: 1 - DNA, 729 bp, Oryza longistaminata
  CDS (1)..(729): homologue/similar gene in O. sativa: Xa21_Os04g0450100
atggggagccttggcggagaggagggggcgaggccggcggagggggcgcggaggccgaggttcctgtgcctgcacgggttccggacgagcggggagatcatgcggaagcaggtggtggggaagtggcccgccgacgtcacggcgcgcctcgacctcgtcttcgccgacgcgccgttccccgccgaggggaagtccgacgtcgagggcatcttcgacccgccctactacgagtggttccagttcgacaagaattttacagagtacaggaatttcgacgaatgcctgaactacatcgaggaattgatgattaaagaagggccttttgatggactgatgggtttctctcagggctcgattctatctggcgcccttccgggcctccaagaacaagggttggccctgactagagttcctaagatcaagtacctcataatcataggaggcgccaagtttcagtcgccgacggttgccgagaaggcgtacgccaataacatcaaatgcccctcggttcacttcctcggtgacactgactttctgaaaacccatggcgaaaagcttatagaatcatatgtggatccattcatcattcgtcatccaaagggccacactgttccaaggcttgatgagaagagtctggaaatcatgctccatttcctcgacaagattgagaaggagacggcgctcgagcattcatccactgatgttgacgaaaaggaaatgtgcttgtga

SEQ ID NO: 2 - protein, 242 aa, Oryza longistaminata
MGSLGGEEGARPAEGARRPRFLCLHGFRTSGEIMRKQVVGKWPADVTARLDLVFADAPFPAEGKSDVEGIFDPPYYEWFQFDKNFTEYRNFDECLNYIEELMIKEGPFDGLMGFSQGSILSGALPGLQEQGLALTRVPKIKYLIIIGGAKFQSPTVAEKAYANNIKCPSVHFLGDTDFLKTHGEKLIESYVDPFIIRHPKGHTVPRLDEKSLEIMLHFLDKIEKETALEHSSTDVDEKEMCL

SEQ ID NO: 3 - DNA, 1086 bp, Oryza longistaminata
  CDS (1)..(1086): homologue/similar gene in O. sativa: Xa21_Os03g0678800
atggacgacatggccaagctagctcagatgccgcgcgctcctctgctcgtcgtcctgatgctgatgctgctgggtgtcggcgcggcggccgtgccggagtacagggaggcgccgcacttcaccaactcggcggcagcgcggtgcccgccgccgctgccggcgacggacgcggacgcggcgtgctcgccgcacgcggcggtgcacgtggccatgacgctggacgcgccgtacctgagggggaccatggccgcggtgctctccgtcctccgccacgcctcctgcccggagtccgtccacttccacttcctcgcctcctcctcctcgtcgccggaggcggcggcggcggcgcgggagctgagggacaccgtgcgggcgtcgttcccgtcgctggcgttccgggtgtacccgttcgacgagtcccgcgtcgcggggctcatctccacctccatccgcggcgcgctcgaccgcccgctcaactacgcccgctcctacctcgccaccacgctccccgcctgcgtccgccgcgtcgtctacctcgactccgacgtcgtggtcaccgacgacatcgccgcgctcgccgcgacgccgctgcccggggagaccgccgtggcggcgcccgagtactgcggcgccaacttcaccgcctacttcacgccggggttctgggcgtcgcgggcgctgtcggagtccgcgttcgcggggcggcgcgcgtgctacttcaacacgggggtgatggtgctggacctgccccggtggcggcgcgcggggtacacggcgcagatcgaggagtggatggagctgcagaggcgggtgcgcatctacgagctgggctcgctgccgccgttcctcctcgtgttcgccggccgcatcgccgccgtcgaccaccgctggaaccagcacggcctcggcggcgacaactaccgggggctctgccgcggcctgcacgccggcgccgtcagcctcctgcactggagcggcaaggggaagccatgggacaggctcgacgccggcaagccgtgcccgctcgacgccgtctgggccaagtacgacctgctccgcccggcggcggcgatcgagacctcgtga

SEQ ID NO: 4 - protein, 361 aa, Oryza longistaminata
MDDMAKLAQMPRAPLLVVLMLMLLGVGAAAVPEYREAPHFTNSAAARCPPPLPATDADAACSPHAAVHVAMTLDAPYLRGTMAAVLSVLRHASCPESVHFHFLASSSSSPEAAAAARELRDTVRASFPSLAFRVYPFDESRVAGLISTSIRGALDRPLNYARSYLATTLPACVRRVVYLDSDVVVTDDIAALAATPLPGETAVAAPEYCGANFTAYFTPGFWASRALSESAFAGRRACYFNTGVMVLDLPRWRRAGYTAQIEEWMELQRRVRIYELGSLPPFLLVFAGRIAAVDHRWNQHGLGGDNYRGLCRGLHAGAVSLLHWSGKGKPWDRLDAGKPCPLDAVWAKYDLLRPAAAIETS

SEQ ID NO: 5 - DNA, 1707 bp, Oryza longistaminata
  CDS (1)..(1707): homologue/similar gene in O. sativa: Xa21_OsJ_21238
atgtcgtctgctgccattgccattagcccgatggtggaagagtttgctctcctgcccatctgcttcgacggcagccggtcgccccactgtttgtccgggtcacagctgcaggattcgattatcatctttcttgctgtgcctggtgccccaccgatgccgatgagtgtgctcggctcggagtccatcgcctcggtcaagctgcgcattcagcggttcaaggggttcgtggttaacaagcagaggcttgtgcttgatgggcacgagctggcaaggaacaactgccatgtgaaggattacgggcttgccgatggaaatgttctgcaccttgttatccgcttggctgatcttcgcttgattaacatcgagactaccagtggaaagaagtttcagttccaggtggaccagagccgcaatgtcaagtatctcaagagtaagctggcagtggagggagatgaggaccttggtgaggatcacaagcttgaatgtgatggcaaggagcttgaggaccaccagctgattgctgatattagcaagaaggatgatgctgtgatccatttgttcatccgcaagccagcaaagttacggacacagcaagttgataaagacacggtggttacagttgtcactccgcaggagaaagagaaccttcaaaatgaagctcatgctgtgaaccctgctaaaccagctggtgctaggcctgctcttgttgaaccaattatcgttaaccacaaggtgaagctatcacttgaagtgatgagaatgattagctcagccatagctggtcttgagaatggatacttgccagtgatgtcagctgaaggttcagggggtgtttacttcatgcaagatgcatcaggagagaagaatattgcagtgtttaagcccagagatgaggaacctatggctaaaaacaacccaagagggcttccagtgtcgactgatggagaaggcatgaagagggggacacttgtaggggaaggtgcatttagggaagttgctgcttatattcttgaccatccaattggtgatcatgaatctgaagaacgtatcgggttctctggtgtgcctcccacagcattggtccggagcttacacagggggaagagcttcaagattggatcactgcagatgttcattcagaacaatggaagttgtgaggatatgggtccccgagcatttccagtgaaggaggtccacaaaatagcagtgttagatcttaggttagcaaacgctgatcgtcatgcagggaacattttagtgtgcaaggatgaagaaggtggcaattacaagttggttccaattgatcatggttactgcttgccagagaagtttgaagattgtacctttgagtggctgtactggccccaggctcgtgaaccattcagtgatgaaaccattgcatacatcaaatcactagacgctgaagaggacatcaagcttctcaagttccatgggtgggagctgtctgcaagatgtgctcgtgtcctgcgcatcagcaccatgcttttaaagaaaggtgcagcacgaggcctcacaccgtatgacatcgggcgtatactgtgcagggaaactgtgaatagagactctgagattgaggacatcgtccaggaagccgaggaccatgttctcccagggtcaagtgaagtaatcttcttagaaaccgtatctgaaatcatagaccgtcacctcgacaagaagttcgcttag

SEQ ID NO: 6 - protein, 568 aa, Oryza longistaminata
MSSAAIAISPMVEEFALLPICFDGSRSPHCLSGSQLQDSIIIFLAVPGAPPMPMSVLGSESIASVKLRIQRFKGFVVNKQRLVLDGHELARNNCHVKDYGLADGNVLHLVIRLADLRLINIETTSGKKFQFQVDQSRNVKYLKSKLAVEGDEDLGEDHKLECDGKELEDHQLIADISKKDDAVIHLFIRKPAKLRTQQVDKDTVVTVVTPQEKENLQNEAHAVNPAKPAGARPALVEPIIVNHKVKLSLEVMRMISSAIAGLENGYLPVMSAEGSGGVYFMQDASGEKNIAVFKPRDEEPMAKNNPRGLPVSTDGEGMKRGTLVGEGAFREVAAYILDHPIGDHESEERIGFSGVPPTALVRSLHRGKSFKIGSLQMFIQNNGSCEDMGPRAFPVKEVHKIAVLDLRLANADRHAGNILVCKDEEGGNYKLVPIDHGYCLPEKFEDCTFEWLYWPQAREPFSDETIAYIKSLDAEEDIKLLKFHGWELSARCARVLRISTMLLKKGAARGLTPYDIGRILCRETVNRDSEIEDIVQEAEDHVLPGSSEVIFLETVSEIIDRHLDKKFA

SEQ ID NO: 7 - DNA, 810 bp, Oryza longistaminata
  CDS (1)..(810): homologue/similar gene in O. sativa: Xa21_Os03g0764100
atgtcgagcgcgtcgtccatggaagcgctccacgccgcggtgctcaaggaggagcagcagcagcacgaggtggaggaggcgacggtcgtgacgagcagcagcgccacgagcggggaggagggcggacacctgccgcaggggtgggcgaagcggaagcggtcgcgccgccagcgatcggaggaggagaacctcgcgctctgcctcctcatgctcgcccgcggcggccaccaccgcgtccaagcgccgcctccgctctcggcttcggcgcccccgccggcaggtgcggagttcaagtgctccgtctgcggcaagtccttcagctcctaccaggcgctcggcggccacaagacgagccaccgggtcaagctgccgactccgcccgcagctcccgtcttggctcccgcccccgtcgccgccttgctgccttccgccgaggaccgcgagccagccacgtcatccaccgccgcgtcctccgacggcgcgaccaacagagtccacaggtgttccatctgccagaaggagttccccaccgggcaggcgctcggcgggcacaagaggaagcactacgacggtggcgtaggcgccggcgccggcgcatcttcaaccgagctcctggccacggtggccgccgagtccgaggtgggcagctccggcaacggccactccgccacccgggcgttcgacctcaacctcccggccgtgccggagttcgtgtggcggccgtgctccaagggcaagaagatgtgggacgacgaggaggaggtccagagccccctcgccttcaagaagccgcgccttctcaccgcgtaa

SEQ ID NO: 8 - protein, 269 aa, Oryza longistaminata
MSSASSMEALHAAVLKEEQQQHEVEEATVVTSSSATSGEEGGHLPQGWAKRKRSRRQRSEEENLALCLLMLARGGHHRVQAPPPLSASAPPPAGAEFKCSVCGKSFSSYQALGGHKTSHRVKLPTPPAAPVLAPAPVAALLPSAEDREPATSSTAASSDGATNRVHRCSICQKEFPTGQALGGHKRKHYDGGVGAGAGASSTELLATVAAESEVGSSGNGHSATRAFDLNLPAVPEFVWRPCSKGKKMWDDEEEVQSPLAFKKPRLLTA

SEQ ID NO: 9 - DNA, 861 bp, Oryza longistaminata
  CDS (1)..(861): homologue/similar gene in O. sativa: Xa21_OsJ_26543
atggggcaggctagggctcacctcctagcctccctgtgggctttctacctcatcctagcaatctccatggtcactggcgacctcaccaatgacctcgacatactgtggggaaactcaaaggtgttctacgacagctccggcaaacagactatctcactgactcttgaccgctggacgacctccgcgttccggtcgaagagcacatacctcttcagtaggatcgacatggacatcaagctcgttgctggagactcagctggaaccgtgactactctttatatgataacagagggcctatggcaattccacgacgagattgaccttgagttcttggggaactccactggcgagccctacaccctgcacactaacctgtacgccagagggaaaggtggcagagagaagcggtacaagctctggtttgatcccactgcagacttccatacctacaccatcatctggaaccaaagaaatatcctaatccttgttgatgacaagctgatccggcagatcaagaacaatttgatgtacagtgtcccgtacccaacctatcagccaatgagggtgtatggcagcatctggaatgccgatgactgggcaacaatgggagggcgggtgaagactgactggtcgcaggcgccattcacagcatacttccggaactacagggctatcgcttgccccccacaacagagctccccactctgcggccagagctctggaaattggttcaaccaggagctggatgtgacacggaaacagcaactgcaggaggtggatgccaactacaagatctacgattactgcactgacaccaagaggttcaaagataatctccccaaagagtgtacgataaactag

SEQ ID NO: 10 - protein, 286 aa, Oryza longistaminata
MGQARAHLLASLWAFYLILAISMVTGDLTNDLDILWGNSKVFYDSSGKQTISLTLDRWTTSAFRSKSTYLFSRIDMDIKLVAGDSAGTVTTLYMITEGLWQFHDEIDLEFLGNSTGEPYTLHTNLYARGKGGREKRYKLWFDPTADFHTYTIIWNQRNILILVDDKLIRQIKNNLMYSVPYPTYQPMRVYGSIWNADDWATMGGRVKTDWSQAPFTAYFRNYRAIACPPQQSSPLCGQSSGNWFNQELDVTRKQQLQEVDANYKIYDYCTDTKRFKDNLPKECTIN

SEQ ID NO: 11 - DNA, 1362 bp, Oryza longistaminata
  CDS (1)..(1362): homologue/similar gene in O. sativa: Xa21_Os01g0186900
atgagctcgctgacggcggcgcagttccggtcgctgtttgagatggccggaggggaggatatctcgtttctgtttggtgatgatgaggcggcggcggtggcggcgccggtggagttgcaggggaagagggggtgggaggaggtggatcaaggggaggggtctggggcggtggcggcgaagaggcagcggtcgccgacgagctcgagggagaatagtagcgggagtaataatgagggtgggcaggaggaggtgtctgaggcggcggcggccatggcggcggcggtggggaggggtggggggaggaggctgtgggtgaaggagagggactcggagtggtgggacacggtgagtagcccggattacccggactcggagttcaggaaggcgttccgcatgtccaaggccacgttcgaggtggtctgcgacgagctcgccgccgccgtcgccaaggaggacaccatgctccgcgccgccatcccggtgcgcaagcgcgtcgccgtctgcgtctggcgcctcgccacgggggagcccctgaggctggtgtccaagcgcttcggcctcgggatctccacctgccacaagctcgtgctcgaggtgtgcgccgcgctcaaggccatggtgatgcccaaggtggtgcgctggcccgaggccggcgacgcggcggccatcgccgcccacttcgaggccatctccgggatctccggcgtcgtcggcgcgatctacaccacccacatccccatcatcgcgcccaagtccaacgtcgcctcctactacaaccgccgccacacggagcgcaaccagaagacctcctactccatgaccgtccagtgcgtcgtcgactccaccggcgccttcaccgacgtctgcatcggctggccggggtccaactccgacgaggaggtgctcgagaagtcggcgctgtacctgcaccgcggcgtgccggggctgatccagggccagtgggtggtcggcggcgggagcttcccgctcatggactggatgctcgtgccctacacccaccagaacctgacatgggcgcagcacatgctcaacgagaaggtcgccgccgtgcgcggcgtggcgcgcgacgcgttcgagcgcctcaagcgccggtggggctgcctccagaagcgcaccgaggtgaagctgctcgacctccccaccgtgctcggcgcctgctgcgtcctccacaacatctgcgagcgcagcggcgacgccgtcgacgccgacgactgcaccttcgacctcttcgacgacgacatggtcgccgagaacgccgtccgctccaccgccgccgcgcaggcccgcgacgccatcgcccacaacctcctccacagcggcgccggcgcatccttcttctga

SEQ ID NO: 12 - protein, 453 aa, Oryza longistaminata
MSSLTAAQFRSLFEMAGGEDISFLFGDDEAAAVAAPVELQGKRGWEEVDQGEGSGAVAAKRQRSPTSSRENSSGSNNEGGQEEVSEAAAAMAAAVGRGGGRRLWVKERDSEWWDTVSSPDYPDSEFRKAFRMSKATFEVVCDELAAAVAKEDTMLRAAIPVRKRVAVCVWRLATGEPLRLVSKRFGLGISTCHKLVLEVCAALKAMVMPKVVRWPEAGDAAAIAAHFEAISGISGVVGAIYTTHIPIIAPKSNVASYYNRRHTERNQKTSYSMTVQCVVDSTGAFTDVCIGWPGSNSDEEVLEKSALYLHRGVPGLIQGQWVVGGGSFPLMDWMLVPYTHQNLTWAQHMLNEKVAAVRGVARDAFERLKRRWGCLQKRTEVKLLDLPTVLGACCVLHNICERSGDAVDADDCTFDLFDDDMVAENAVRSTAAAQARDAIAHNLLHSGAGASFF

SEQ ID NO: 13 - DNA, 1275 bp, Oryza longistaminata
  CDS (1)..(1275): homologue/similar gene in O. sativa: Xa21_Os01g0802700
atgattacgggttcggaggtgtaccaggtggtggaggcgatggcgccgctgtacacggcggcggcgctggggtacgggtcggtgcggtggctgaaggcgttctccaacgagcagtgcgccgggatcaaccacttcgtggcgctctacgccgtgccggtgctcatcttcgacatggtgtccaccaacgacgtgtacaagatgaacggccgcctcatcgccgccgacacgctgcagaaggccgtgctgctgctgggcctcatggcgtgggcgctctgggagaggtcgcgcgcgcgccgcgccggggcgaaggcggtgtcgtcgccgctgcagtgggtcatcacctgcttctccgtcgcgtcgctgcccaacaccatcatcatgggcgtgccgctcctcaacggcatgtacgggcccgtgtccaaggacctcatgaagcagatcgtcgtcatgcagttctgcatctggtacaacgtcatcatcttcctctacgagtacatggcggcgcgtagatcggcctcggcgccgccgccggcgtcgtcggagggcagcgccaagatcagcccttcgtcgccggtgaaagctgcggcggcggcggcggcggacgcgaacggcaatgctgtcgcggccgaccggccgcaagaagtggcggtgaacatcgaaatcacggagatggcggcgtccacggcacgagacggcgtgtccggcgagacgacggcggccgccaaggaggtgagcgccggtgaagttgctccggtggaagaagaggaggcctctgcgccagcgccgtcgatgaagcacgtcatctggatggcggtgaagaagctgctacagattccgaatacctatgcaagcttccttggcctcatctggtctctaatcgcattcaagtgtggattctcgatgccaaaaatcgtcgaggactctctgttcaccattcgtaccaccgctgttggcctaagcatgttttcttcagggacgttcatagcgcggcagtcgcggttcgtgccgtgcggatacaagatcgcgtcgttctccatggtcatcaagtttctgataggcccggttgtgatgctgttcgcctcgctcgtcatcggcatgcacggcacacttctgcacatcgctgttgtgcaggcggctctccccctggcagtgacatcatttgtgtacgctgaagagtacaaggtccacgcagacatcatgagcacaggggttattcttgggatatttatatcacttcctgtgacaattgtttactatattctgttggggctgtga

SEQ ID NO: 14 - protein, 424 aa, Oryza longistaminata
MITGSEVYQVVEAMAPLYTAAALGYGSVRWLKAFSNEQCAGINHFVALYAVPVLIFDMVSTNDVYKMNGRLIAADTLQKAVLLLGLMAWALWERSRARRAGAKAVSSPLQWVITCFSVASLPNTIIMGVPLLNGMYGPVSKDLMKQIVVMQFCIWYNVIIFLYEYMAARRSASAPPPASSEGSAKISPSSPVKAAAAAAADANGNAVAADRPQEVAVNIEITEMAASTARDGVSGETTAAAKEVSAGEVAPVEEEEASAPAPSMKHVIWMAVKKLLQIPNTYASFLGLIWSLIAFKCGFSMPKIVEDSLFTIRTTAVGLSMFSSGTFIARQSRFVPCGYKIASFSMVIKFLIGPVVMLFASLVIGMHGTLLHIAVVQAALPLAVTSFVYAEEYKVHADIMSTGVILGIFISLPVTIVYYILLGL

SEQ ID NO: 15 - DNA, 1206 bp, Oryza longistaminata
  CDS (1)..(1206): homologue/similar gene in O. sativa: Xa21_OJ1759_F09.33(Os09g0369400)
atggcgaaggcgagcatggtggtgcctgagcaggtgggcgcggcggcggcggcgcaggtggggtgcccctgtccgggcacgacgctgttcccgtacccgccgccgcgcgccgggatcgccgtgcggcgcaagtgcctgcaggcggcgcagcagctggagctcggcgccgggctgcgcggcggctgggtggagtccatgcgggcgtcgtcgcccacccacgccaaggccgccgccgccctcgccgccggcgtcgacgaggagcacgccgcctggatggtccgtttccgttcaccgattgatcgatgttcgtcgcgttcttggcgcgcgcgcgctgacactgacatgaaccgtgcatttccgttcgtctttgtgcaggcgaggcacccgtcggcgctgggcgagttcgagaaggtggtggcggcgtcgaaggggaagcagatcgtcatgttcctcgactacgacggcaccctctcccccatcgtcgacgaccccgacgccgccttcatgagcgagacgatgcggatggccgtgcgcagcgtggcgaagcacttcccgacggcgatcgtgagcgggcggtgccgcgacaaggtgttcgagttcgtcaagctcgccgagctgtactacgcggggagccacggcatggacatcaagggccccgcctcccgccacgccgccgtcaagtctcctccccacaacaagggcgtcctcttccagccggccagcgagttcctccccatgatcgagcaggtgcacgaccgcctcgagcaggcgacccgctccatcccgggcgccaaggtcgagaacaacaagttctgcgtctccgtccacttccggtgcgtcgacgagaagagttggggggcgttggcggagacggtgaggagggtggtgagggagttcccgcggctgcggctgagccaggggaggatggtgttcgaggtgcggccgaccatcaagtgggacaagggcaaggccctcgagttcctcctcgactcgctcggtttcgccgactgcagcgacgtgctgccggtctacatcggcgacgaccgcacggacgaggacgcgttcaagggcctggggatcctggtgtcgaagcaccccaaggagacgaccgcctccttctccctccaggagcccgccgaggtgatggagttcttgctgcggctcgtggagtggaatcgcctgtccaggacacggttgaggctgtaa

SEQ ID NO: 16 - protein, 401 aa, Oryza longistaminata
MAKASMVVPEQVGAAAAAQVGCPCPGTTLFPYPPPRAGIAVRRKCLQAAQQLELGAGLRGGWVESMRASSPTHAKAAAALAAGVDEEHAAWMVRFRSPIDRCSSRSWRARADTDMNRAFPFVFVQARHPSALGEFEKVVAASKGKQIVMFLDYDGTLSPIVDDPDAAFMSETMRMAVRSVAKHFPTAIVSGRCRDKVFEFVKLAELYYAGSHGMDIKGPASRHAAVKSPPHNKGVLFQPASEFLPMIEQVHDRLEQATRSIPGAKVENNKFCVSVHFRCVDEKSWGALAETVRRVVREFPRLRLSQGRMVFEVRPTIKWDKGKALEFLLDSLGFADCSDVLPVYIGDDRTDEDAFKGLGILVSKHPKETTASFSLQEPAEVMEFLLRLVEWNRLSRTRLRL

SEQ ID NO: 17 - DNA, 1650 bp, Oryza longistaminata
  CDS (1)..(1650): homologue/similar gene in O. sativa: Xa21_OsI_24487
atgcctcactcctcctacctcgccctcgccctcgccgttgcggcggttcttgctatggccgccgtcgaggtgtccggcctcggcttcgacctccaccaccgctactcccccatcgtgcagcggtgggcggaggagcgtggccacgccggcgtgtcctggcctgccggcgccgaggtgatcggctcgcccgagtactactccgcgctgtcccgacacgaccacgccctcttcgcgcgacgcgggctcgcccagggcgacggcctcgtcaccttcgccgacggcaacatcaccctgcggctcgacggatcgctgcactacgcggaggtggcggtgggcacgccaaacacgacgttcctggtggcgctcgacaccggcagcgacctcttctgggtgccctgcgactgcaagcagtgcgctcccctcggcaacctcacggcggtggacggcggcggcggcccggagctcaggcagtacagcccgagcaagtcgtcgacgagcaagacggtcacctgcgccagcaacctctgcgaccagcccaacgcctgcgccacggccaccagcagctgcccctacgccgtccgctacgccatggccaacacctcctcctccggcgagctcgtcgaggacgtgctctacctcaccagggagaagggcgccgccgccgccgccggagccgccgtgaaaactcccgtggtgttcgggtgcgggcaggtgcagacgggctcgttcctcgacggcgccgccgccgacggcctcatgggtctcggcatggagaaggtgtccgtgcccagcatcctcgccagcaccggcgtcgtcaagtcgaacagcttctccatgtgcttcagcaaagacggcctcggccggatcaacttcggcgacaccggcagcgccgaccagtccgagacgccattcatcgtcaaatccacacactcgtactacaacatcagcatcacgtcgatgagcgtcggggacaagaacttgccgttggggttctacgccattgctgactccggcacgtccttcacctacctcaacgacccggcctacacggcctacaccaccaatttcaacgcgcagatcagcgagaggagggccaacttcagcggcagtactcgttctggtccatttcctttcgagtactgctactcgttgagtcctgatcaaacaacggtggaactgcctattgtgagcctgacgaccaatggaggagccgtgttcccggtgaccaggcctgtttaccccatcgcggttcagatgacaaatggaaagattcgtgtcattggttactgcctggctgtcatcaagagcgatctccccatcgacatcattggccagaacttcatgaccgggctcaaggtcgtcttcaaccgtgagaaatccgtcctgggctggcaaaagttcgactgttacaaggacgagaagatgacagacgacgggtcaggcgtcgggagcccgagcccatcgccggggccgaccacccacgtcttcccgcagccgcaggagagcgactcgccggcgggcagaacgcccatccccggcgcggcgccggtgccgcggtcgagcagcgcggcagctggcggccgtgcaggcgtccggctcctgtcgtccatggcgctcatgctgctggctgctgctacagtagttttctga

SEQ ID NO: 18 - protein, 549 aa, Oryza longistaminata
MPHSSYLALALAVAAVLAMAAVEVSGLGFDLHHRYSPIVQRWAEERGHAGVSWPAGAEVIGSPEYYSALSRHDHALFARRGLAQGDGLVTFADGNITLRLDGSLHYAEVAVGTPNTTFLVALDTGSDLFWVPCDCKQCAPLGNLTAVDGGGGPELRQYSPSKSSTSKTVTCASNLCDQPNACATATSSCPYAVRYAMANTSSSGELVEDVLYLTREKGAAAAAGAAVKTPVVFGCGQVQTGSFLDGAAADGLMGLGMEKVSVPSILASTGVVKSNSFSMCFSKDGLGRINFGDTGSADQSETPFIVKSTHSYYNISITSMSVGDKNLPLGFYAIADSGTSFTYLNDPAYTAYTTNFNAQISERRANFSGSTRSGPFPFEYCYSLSPDQTTVELPIVSLTTNGGAVFPVTRPVYPIAVQMTNGKIRVIGYCLAVIKSDLPIDIIGQNFMTGLKVVFNREKSVLGWQKFDCYKDEKMTDDGSGVGSPSPSPGPTTHVFPQPQESDSPAGRTPIPGAAPVPRSSSAAAGGRAGVRLLSSMALMLLAAATVVF

SEQ ID NO: 19 - DNA, 1221 bp, Oryza longistaminata
  CDS (1)..(1221): homologue/similar gene in O. sativa: Xa21_Os04g0119500
atgtcggcgttgctcgatctgctcatgggggtcttccgccagccgaccctcggcggcgtcgccctcgagctcgcctccctcgccgcgccgctctggctcgccgccctcgtcggcctactcatcggctgggcgtggcgcccgcgctgggccctcgccgtcgtcggggaggcgccgccggagacccccgcccttccgccaccgcgcgccgccgccgaggactcctgccgcaacaacgagcttgtacccgtcgttcctagaactgcggttgccgccgccacgccagtggaggatgagggattggccgtcgacaccggagatttgatgcacctccgccgccttgtcgaggagaaggacggcgggccggcgtggattcacatgatggacaagacgctgcccacgatgcgctaccaagcatggaggagagatcctgagggtggcccgcctcaataccgcactagcactatctttgaggatgcatcgccagaagttgtcagggatttcttctgggatgatgagttccggattaagaacacttgggacgacatgcttcttcagcacgagacgttggaggagtgcacaaagactggaacgatggttctccggtgggtcaggaagttcccgttcttctgcagtgacaaggagtacattatcggtcgcaggatatgggcatctggaaagacgtattactgtgtaacaaagggtgtgcctcgcccctctgttccaaggtgcaacaaacctcgtcgtgtggacgtgtactactctagttggtgcatccgtccagtcgaagcaagaaacggtgatggctcaatgaccgcatgtgaggtgctcctgttccatcatgaggaaatggggattccaagggaaattgcaaagctcggtgttcggcaggggatgtggggctgcgtcaaaaggattgagcctggcttgagggcataccaaatcgcaaggactgctggcgagcccctttcaaaatgcgctgccatggcacatgtcaacacgaaggttgatcctgatgagctcatcactgcagaggacaagaccgaggccagttcaaccaacaacgctgaagctgagaaaccaaagcactggacaggcaatatacccaaagtcatccttgtaggtggcgcagttgccctggcatgcacgtttgaccatggactgttaacaaaggctctcatatttggtacggcgaggaggtttgcaggaccaggaaggagatga

SEQ ID NO: 20 - protein, 406 aa, Oryza longistaminata
MSALLDLLMGVFRQPTLGGVALELASLAAPLWLAALVGLLIGWAWRPRWALAVVGEAPPETPALPPPRAAAEDSCRNNELVPVVPRTAVAAATPVEDEGLAVDTGDLMHLRRLVEEKDGGPAWIHMMDKTLPTMRYQAWRRDPEGGPPQYRTSTIFEDASPEVVRDFFWDDEFRIKNTWDDMLLQHETLEECTKTGTMVLRWVRKFPFFCSDKEYIIGRRIWASGKTYYCVTKGVPRPSVPRCNKPRRVDVYYSSWCIRPVEARNGDGSMTACEVLLFHHEEMGIPREIAKLGVRQGMWGCVKRIEPGLRAYQIARTAGEPLSKCAAMAHVNTKVDPDELITAEDKTEASSTNNAEAEKPKHWTGNIPKVILVGGAVALACTFDHGLLTKALIFGTARRFAGPGRR

SEQ ID NO: 21 - DNA, 576 bp, Oryza longistaminata
  CDS (1)..(576): homologue/similar gene in O. sativa: Xa21_Os10g0455100
atggcaggcactaagcttgcagctcttgggtttattgtcctcttgagcattggattagctagtgctgtaagggtagaaagatactcaaatgcccaaggttcgggcacaggaagtggagagggcacaggaagcgtgaacggtgcgggagctgggttgggaagtgggactgggtctggtagcagtggttacaatggtgcccatgcaagtggtggaggaggaggcggaggcggtggttacagccaatatggtgggtcagggtctggtagtggatctggttcgggctcaggctctagccagaccagtcaaaatgggtattatggttatggtggatcatcaagtgctggcggtagcggtgctggtgctggagctggacaagctggtggttactggccatcctacggtcatgggtctggtagtggtaccggctcaggctctagtgaggctactaatacctggtatggacagtatgcaaatgcaaatgctggtggcaacggtggtggtaacggtcagggccaatatggtggcagcggtgctggtgtaggttctggatctgggttcggtgatgcgaacccttaa

SEQ ID NO: 22 - protein, 191 aa, Oryza longistaminata
MAGTKLAALGFIVLLSIGLASAVRVERYSNAQGSGTGSGEGTGSVNGAGAGLGSGTGSGSSGYNGAHASGGGGGGGGGYSQYGGSGSGSGSGSGSGSSQTSQNGYYGYGGSSSAGGSGAGAGAGQAGGYWPSYGHGSGSGTGSGSSEATNTWYGQYANANAGGNGGGNGQGQYGGSGAGVGSGSGFGDANP

SEQ ID NO: 23 - DNA, 1320 bp, Oryza longistaminata
  CDS (1)..(1320): homologue/similar gene in O. sativa: Xa21_P0512G09.2-1
atggccggaggggaggatatctcgtttctgtttggtgatgatgaggcggcggcggtggcggcgccggtggagttgcaggggaagagggggtgggaggaggtggatcaaggggaggggtctggggcggtggcggcgaagaggcagcggtcgccgacgagctcgagggagaatagtagcgggagtaataatgagggtgggcaggaggaggtgtctgaggcggcggcggccatggcggcggcggtggggaggggtggggggaggaggctgtgggtgaaggagagggactcggagtggtgggacacggtgagtagcccggattacccggactcggagttcaggaaggcgttccgcatgtccaaggccacgttcgaggtggtctgcgacgagctcgccgccgccgtcgccaaggaggacaccatgctccgcgccgccatcccggtgcgcaagcgcgtcgccgtctgcgtctggcgcctcgccacgggggagcccctgaggctggtgtccaagcgcttcggcctcgggatctccacctgccacaagctcgtgctcgaggtgtgcgccgcgctcaaggccatggtgatgcccaaggtggtgcgctggcccgaggccggcgacgcggcggccatcgccgcccacttcgaggccatctccgggatctccggcgtcgtcggcgcgatctacaccacccacatccccatcatcgcgcccaagtccaacgtcgcctcctactacaaccgccgccacacggagcgcaaccagaagacctcctactccatgaccgtccagtgcgtcgtcgactccaccggcgccttcaccgacgtctgcatcggctggccggggtccaactccgacgaggaggtgctcgagaagtcggcgctgtacctgcaccgcggcgtgccggggctgatccagggccagtgggtggtcggcggcgggagcttcccgctcatggactggatgctcgtgccctacacccaccagaacctgacatgggcgcagcacatgctcaacgagaaggtcgccgccgtgcgcggcgtggcgcgcgacgcgttcgagcgcctcaagcgccggtggggctgcctccagaagcgcaccgaggtgaagctgctcgacctccccaccgtgctcggcgcctgctgcgtcctccacaacatctgcgagcgcagcggcgacgccgtcgacgccgacgactgcaccttcgacctcttcgacgacgacatggtcgccgagaacgccgtccgctccaccgccgccgcgcaggcccgcgacgccatcgcccacaacctcctccacagcggcgccggcgcatccttcttctga

SEQ ID NO: 24 - protein, 439 aa, Oryza longistaminata
MAGGEDISFLFGDDEAAAVAAPVELQGKRGWEEVDQGEGSGAVAAKRQRSPTSSRENSSGSNNEGGQEEVSEAAAAMAAAVGRGGGRRLWVKERDSEWWDTVSSPDYPDSEFRKAFRMSKATFEVVCDELAAAVAKEDTMLRAAIPVRKRVAVCVWRLATGEPLRLVSKRFGLGISTCHKLVLEVCAALKAMVMPKVVRWPEAGDAAAIAAHFEAISGISGVVGAIYTTHIPIIAPKSNVASYYNRRHTERNQKTSYSMTVQCVVDSTGAFTDVCIGWPGSNSDEEVLEKSALYLHRGVPGLIQGQWVVGGGSFPLMDWMLVPYTHQNLTWAQHMLNEKVAAVRGVARDAFERLKRRWGCLQKRTEVKLLDLPTVLGACCVLHNICERSGDAVDADDCTFDLFDDDMVAENAVRSTAAAQARDAIAHNLLHSGAGASFF

SEQ ID NO: 25 - DNA, 483 bp, Oryza longistaminata
  CDS (1)..(483): homologue/similar gene in O. sativa: Xa21_OsI_03946
atggcgtcgctcaccaccaccgccgccgcgtcctccccggccgcgctgccggcggcctcgaccaccgccccggcgtcgtccgtgtccccggccgccgcggccgccaagcggccgcacctcgccggggacgacgcgccgtggcgggcggcgaccggcgccgcggggatccgccccgtcccgcgcatccaccacgcccccgtcctccgcgtcgcgcaggacgattattccgcctacgccctcgccgtcatgaagcatccggatccgataggggaggggttggccatggaggctatggtggaggcggccgggccggagtgcatcgtgcccgggcagcaggcgccgctgcggctgctgggcctcaaggtttggccccttgatatagagatgaagttcctggagccatttggacgggaactacattccatgaaaaagttcatggacaagtcatgcagcgttatggactcatctatgtcaaataagtag

SEQ ID NO: 26 - protein, 160 aa, Oryza longistaminata
MASLTTTAAASSPAALPAASTTAPASSVSPAAAAAKRPHLAGDDAPWRAATGAAGIRPVPRIHHAPVLRVAQDDYSAYALAVMKHPDPIGEGLAMEAMVEAAGPECIVPGQQAPLRLLGLKVWPLDIEMKFLEPFGRELHSMKKFMDKSCSVMDSSMSNK

SEQ ID NO: 27 - DNA, 1449 bp, Oryza longistaminata
  CDS (1)..(1449): homologue/similar gene in O. sativa: Xa21_Os03g0241900
atggccgccaagcagagcctctacccggaggtgaaccagtcccaccccgacctcaacaccgccttcctcgccaaccccaaccgcgccgccaccgccagccccggcggctcgctctacccctccgtcgacccgcagcagctcgccgagaacctcttccccgacgccgccgatgacgccgcgccgccgcctcccaccaccgaggaggccctcgtcgcggttccgggcgcgcagctccacctcgtcgaccccgaccgcagcatggacctcggtgccggcacgctctccgtcgtccgcctccgccagggggaccactccgtcgccgtcctcgcgaggctcgtcccggagaagcgcagccagcgccgcggcggcctcttcggcttcttgagcggcggcgggaaggccggcgacggcgccgcgcaggagcccgtgcagtggccgctcacccgcgacgtcgccgccgtcaagctcgacaccgcgcactacttcttctcgctccacgtcccgcacacagatcacgaggatgacgacgccgaggaggccgaggcggagaaggacgcggacggggaggcggcgctgagctacgggctcacggtcgccagcaaggggcaggaggcggtcctggcccagctggacaaggtactggaggagtacaccaccttctcggtgaagcaagtggaacccgcggcgaaggagaagtcgggggtgatggacacgaaggcggtgacggagatcacgccggaggaggccgttggggacaagaaggaggtggtggaggagcaatcggcggcgttctggacgacgatcgcgccgaacgttgacgactacagctcgtcggtggcgaggctgatcgcgcgaggctcggggcagctggtgaggggcatcatctggtgcggggacatcacagcggagggcctccggtgtggggaggcggtgatgaagaagagcgtggggccgagtgggaagccgtcacaggtgaagccgagcactatcaggaggatgaagagggctagaagggttacgaagatgtccaacagggtagcaaattcaatcctctctggtgttctaaaggtctctgggtttgttaccagcactgtgctgaactcgaaacctgcccagaaattctttaagttgatgccgggcgaagttattcttgcttcactcgatggatttgggaaagtatgggatgctgtagaggtgtctggaaagaatgtgatgcggacatcgtcggttgtgacaacttctgttgtaacacatagatacggagatcaagctggacaggtcacacaggattaccttcacgccactggaaacgctcttggagtcgcatgggctgtcttcaaaattcggaaagctctcgacccaaagggcaatctgaagaagtcgtctctggcgagcgctgcagcccatgctgtagctaaagaatcgatatctcggcaaaaaaggaagtga

SEQ ID NO: 28 - protein, 482 aa, Oryza longistaminata
MAAKQSLYPEVNQSHPDLNTAFLANPNRAATASPGGSLYPSVDPQQLAENLFPDAADDAAPPPPTTEEALVAVPGAQLHLVDPDRSMDLGAGTLSVVRLRQGDHSVAVLARLVPEKRSQRRGGLFGFLSGGGKAGDGAAQEPVQWPLTRDVAAVKLDTAHYFFSLHVPHTDHEDDDAEEAEAEKDADGEAALSYGLTVASKGQEAVLAQLDKVLEEYTTFSVKQVEPAAKEKSGVMDTKAVTEITPEEAVGDKKEVVEEQSAAFWTTIAPNVDDYSSSVARLIARGSGQLVRGIIWCGDITAEGLRCGEAVMKKSVGPSGKPSQVKPSTIRRMKRARRVTKMSNRVANSILSGVLKVSGFVTSTVLNSKPAQKFFKLMPGEVILASLDGFGKVWDAVEVSGKNVMRTSSVVTTSVVTHRYGDQAGQVTQDYLHATGNALGVAWAVFKIRKALDPKGNLKKSSLASAAAHAVAKESISRQKRK

SEQ ID NO: 29 - DNA, 348 bp, Oryza longistaminata
  CDS (1)..(348): homologue/similar gene in O. sativa: Xa21_Os05g0498400
atgtctgatctcgacgttcagcttccatctgccttcgatccgtttgctgaggcaaatgctgaggactccggcgctggccctggagcaaaggattatgtgcatgtgcgcatccagcagcgcaacggcagaaagagtctaactactgttcagggcttaaagaaggagtacagttacaacaagatcctcaaggatctgaaaaaggagttctgctgcaatggtactgtagtccaagatccggagcttggccaggtcattcagcttcaaggtgatcagcgtaagaatgttgccacgttcctagttcaggctgggattgctaagaaggacaacatcaagattcacggtttctaa

SEQ ID NO: 30 - protein, 115 aa, Oryza longistaminata
MSDLDVQLPSAFDPFAEANAEDSGAGPGAKDYVHVRIQQRNGRKSLTTVQGLKKEYSYNKILKDLKKEFCCNGTVVQDPELGQVIQLQGDQRKNVATFLVQAGIAKKDNIKIHGF

SEQ ID NO: 31 - DNA, 1638 bp, Oryza longistaminata
  CDS (1)..(1638): homologue/similar gene in O. sativa: Xa21_Os05g0585500
atgggcgcccgcgcctctcgccaccgccaatcccccgaccaatcccaatcccaatcccaatccccatccccacaccacaagcaccaccaccaccaccaaaccacccgggcccccaagcccaagcccaagccccagccgccgccgccgccgcagcagcagccgcggtctcagcctccgccgccgccgccgcggcagcagctccagccccagcaggcggcggcggaggatggggtggggcgggtgctggggcggcccatggaggacgtccgggcgacctacaccttcgggcgggagctggggcgggggcagttcggggtgacctacctcgccacccacaagcccaccggccgacgctacgcctgcaagtccatcgccgcccgcaagctcgcccgccccgacgacctcgacgacgtccgccgcgaggtccacatcatgcaccacctcaccggccaccgcaacatcgtcgagctgcgcggcgcctacgaggaccgccactccgtcaacctcgtcatggagctctgcgagggcggcgagctcttcgaccgcatcatcgccaggggccactactccgagcgcgccgccgccgccctctgcagggagatcgtctccgtcgtccacagctgccactccatgggggtcatgcacagggacctcaagcccgagaacttcctcttcctcaacaagcgcgaggactccccgctcaaagccaccgattttggcctctccgtcttcttcaagcccggtgagcagttcagagatcttgttggaagtgcatattatgtggctcctgaagtcctcaaacgacgctatggagctgaggcagacatatggagtgctggagttatcctttacatccttctatcaggcgttcctccgttctgggcagaaaacgaggacggtatatttgatgctgttctgcaaggtcatatcgacttctcatctgaaccatggccttctatatctagtggcgcaaaagacttggtcaagcggatgcttcggcaggacccaaaggagcggttaactgctgctgaaattttgaaccacccatggattagagaggatggagaggccccagataaaccacttgatattacagtgatcagtagaatgaagcagttcagagcaatgaacaaacttaagaaggttgccttgaaggtcgttgcagagaacttgtcagaggaagagattgtgggtttaaaggaaatgttcaaatctttagatactgataacagtgggacaataactcttgaagaactaagagctggtctaccaaagcttggcactaaaatttcggaatcagaattaaggcagttgatggaagcggctgatgttgatggaaatgggtccattgattatgttgaatttatatcagcaacgatgcacatgaatagattagagaaggaagatcacatatataaagcatttgaatattttgacaaggaccacagcgggttcataacagtcgatgaattggaagaagctctgacgaagtacgacatgggtgatgaagcgacaattaaagaaataattgctgaagtggatacagaccatgatggaagaattaactaccaggagtttgttgccatgatgaagaacaacagccctgagattgttccaaatcgacggcggatgttttaa

SEQ ID NO: 32 - protein, 545 aa, Oryza longistaminata
MGARASRHRQSPDQSQSQSQSPSPHHKHHHHHQTTRAPKPKPKPQPPPPPQQQPRSQPPPPPPRQQLQPQQAAAEDGVGRVLGRPMEDVRATYTFGRELGRGQFGVTYLATHKPTGRRYACKSIAARKLARPDDLDDVRREVHIMHHLTGHRNIVELRGAYEDRHSVNLVMELCEGGELFDRIIARGHYSERAAAALCREIVSVVHSCHSMGVMHRDLKPENFLFLNKREDSPLKATDFGLSVFFKPGEQFRDLVGSAYYVAPEVLKRRYGAEADIWSAGVILYILLSGVPPFWAENEDGIFDAVLQGHIDFSSEPWPSISSGAKDLVKRMLRQDPKERLTAAEILNHPWIREDGEAPDKPLDITVISRMKQFRAMNKLKKVALKVVAENLSEEEIVGLKEMFKSLDTDNSGTITLEELRAGLPKLGTKISESELRQLMEAADVDGNGSIDYVEFISATMHMNRLEKEDHIYKAFEYFDKDHSGFITVDELEEALTKYDMGDEATIKEIIAEVDTDHDGRINYQEFVAMMKNNSPEIVPNRRRMF

SEQ ID NO: 33 - DNA, 1935 bp, Oryza longistaminata
  CDS (1)..(1935): homologue/similar gene in O. sativa: Xa21_Os07g0680600
atggcaatctcagacgccagagtggttcgccatgtgaggtgtcccaaatgcttcagtgttcttcaggagcccaccggcgcgccggtgtaccaatgcggtggatgcggcactaccctccgagcgaaaaaccgcaccggcaactcacaggaggtgatcagtgctccctcctctttggggagtggcctgcctcctcacagcaagcacctgggctccagtgatgttgcaagcaccagtggatccactcctgaagctcaaatcagcggtgggcagcaaggagctgacatgacaagccgacgcgagaccgatgatctcgtgtcggcgaggaacaatgctcctgagcgagtggtgccagctgaggaggaggaagagcatgttcagagtattagtcagctagctgttggcaattctgaagatctcacaagaggagatgcagctactgcagctgatgcacagtgcagtgacagagcatctgaaggcaaggtgcaattttcagagagaagagaagacagtaacaccaatctacaagatgttcagcgaagcagagatgacgaatctgatgctgaaggcaagaaaagttcagaggaaacatcccaatctccgcgccacgatgtcgtcgagcttccaccaagttcagctcaaaccccagactcacaacctgcaccggccgtgttgagaagggaggatgatccggcgacgagtcctcctcatggccatgcgcgtcgatcaccagagaacttggcgccgcttcagaagaggatcctgaagacagtggacaacctgaaagacgacctctctgaacttttcagtaaatctcctgaactgaacaagccaaggacgcacgcgcgccctcctcgtcttcccaggcaagaaggctacgctcctcgcgacgcggccatggcggcggcggcgagcatccaagccatcagagcgcgtcacgcagctgtccaccgtcccggctacatagctcgtgcaggcaagcctggtcagctcgctgctccacctccaccacgtggtttgccgtcgcggcgctaccgccggtgcagggctgatcacccgtgctgccacgacgcgcgccatgggccgtcgtgccatcacggttgctgcccccctcaccatggcaagcaagcgtgcaccagctgccggggacaacattgctgccggccaagaacgcaagaacctcctgcgccgcggcggccggcggcggcggcggcaaaggaggtcgtcaagcggcgggcgccacccaggaaccattgccggccggtgctcaagggcgcgccgttcatcatctgctccagctgcttcaagctggtccaggtgcccgccgacttcgccgtctcgaccaagacggtgcgcaagctgcgttgcggctcatgctccgccgtcctctgctactcctaccgggaccccgacaggaagaagcacggcgatcagtacagcgccgacggctcaccggcggcgccgcgcggccacgggcggcgaggcgacaagttcgcgttcctggacgacttcggccacgtcgacgtgagctactccacggaggacgagcagccgctgcacgtgtcgaggaactcgtcgttcaacaccgtcgacgagatggcggcggcggcgacggcgccgccgcagcagcagcatggctccagcctgcaccggctgatggggtacggctcggcgagcgacctgctgttccggcagcactcgcctgacctgtacgagagcttctccgagaggacgacgccggaggccgccgcgctgtacgaccggaaagggaaaggcgtctgcgtcgacctcgacgacgacggcggcgacgatgactcagacgaggattgcagcggcgcgctgaagaggtcgaggctgagagggtccggttggccattgccggggatactcaacagcaaggggacgcctggaatgggagcaatcaggatcaagtcatag

SEQ ID NO: 34 - protein, 644 aa, Oryza longistaminata
MAISDARVVRHVRCPKCFSVLQEPTGAPVYQCGGCGTTLRAKNRTGNSQEVISAPSSLGSGLPPHSKHLGSSDVASTSGSTPEAQISGGQQGADMTSRRETDDLVSARNNAPERVVPAEEEEEHVQSISQLAVGNSEDLTRGDAATAADAQCSDRASEGKVQFSERREDSNTNLQDVQRSRDDESDAEGKKSSEETSQSPRHDVVELPPSSAQTPDSQPAPAVLRREDDPATSPPHGHARRSPENLAPLQKRILKTVDNLKDDLSELFSKSPELNKPRTHARPPRLPRQEGYAPRDAAMAAAASIQAIRARHAAVHRPGYIARAGKPGQLAAPPPPRGLPSRRYRRCRADHPCCHDARHGPSCHHGCCPPHHGKQACTSCRGQHCCRPRTQEPPAPRRPAAAAAKEVVKRRAPPRNHCRPVLKGAPFIICSSCFKLVQVPADFAVSTKTVRKLRCGSCSAVLCYSYRDPDRKKHGDQYSADGSPAAPRGHGRRGDKFAFLDDFGHVDVSYSTEDEQPLHVSRNSSFNTVDEMAAAATAPPQQQHGSSLHRLMGYGSASDLLFRQHSPDLYESFSERTTPEAAALYDRKGKGVCVDLDDDGGDDDSDEDCSGALKRSRLRGSGWPLPGILNSKGTPGMGAIRIKS

SEQ ID NO: 35 - DNA, 2571 bp, Oryza longistaminata
  CDS (1)..(2571): homologue/similar gene in O. sativa: Xa21_protkinase
atggaattagtagaagtggagtggcacggggaagacataagcaggcaattaagagtgcgccgcctgaatgctggctttctaagcatcgactgcggcctagaggacaccagcggctacaaggaagacaagactggcatcatctacgtctccgacggctcctacgtcgatgccggggagaaccaccgtgtgtcggcggaggaagagaacgcgaaattgccacgtccgtacgcgacgctccggagcttcccttccggcatgcggaattgctacacgctgcccgcggacgctggggccaagtaccttgtccgggtggtgtccttctacggcaactacgacgggaagaacagctcatcgtcgttgcagttcgacctgcacctcgggacaaactactgggccactgtccgcgctgacggcaacaacgtgtacgaggcgctgttcgtggcctgggcgagctgggtgccggtgtgtctcgtgaacaccggccgtggcacgccgttcgtgtccgcggtggagctgaggcagctcagcggcgagctctacccgggcctcaatgccagccagtccttgtccatgtatggacggcgcaacatgggttcaaacatttcatatacacgttacccccacgatcgatatgaccggtactggtggcaggtatggtctgatccaatgtggaagaacatttccactccatcaaccatcgaacagagctccatcttcgctttgcccctccccgttatccagaccgcagttgagacggtcagcaataagacaatgctcaacattacatggcaagcggaaacaccccgaggctttttggttttcttgcacttcgccgacttccagaacagtcaattccgacagttcaaggtcgcttttaacaatgactatcgtgataactatagcccaccatacatgaccacagatgccttgtttggcttgacaagggccaccagtggcatgtacagcatcagtattggagccaccgatgcatctaagctgccgccgatgctaaacgcgattgaggcatacactctcatgtcccgtgacaacccaataacgttcccaaacgattttgacactatcatggcaattaaacatgaatacgggataaagaagaattggatgggtgatccatgtttcccaacacaatttgcatgggatggcgtgaaatgcaacaatgcaagtggtaacaatacgaggataatatatttggatctctcgaacaacaacttgcatgggccgatatctaataactttacattgctcacggcactcaagtacctgaatttgtcgggcaaccagctgaatgcacccattcctaagtccctctgtgaaaacaataatacaggatcattgattctcagtttcgattctgaccgagaaacgtgcacaataataccgcctccaacaataaaaaaattgaacaaagcaatcttagctatttcggtagtggttcctgtgatggccattgctattcttgttctcgcttatttgatctggagacagaaaagaaaaccaaacatatcaatagatgatactccgagagaacgacaagctgaaaatgttccagcaagcagaaaaaaccatgggaatgccttgctaatggttgagaatcgccaattcacatacaaggagcttgagaagttaactaataagtttgaacgcttcattggacaaggaggttttggactcgtgtactacggacttatagaagatggtattgaggttgctgtcaagatacgttctgagtcatcgtgtcatggactcgatgaatttttcgctgaggttcaaagtttgacaaaggtgcatcacagaaatctagtttccttggttggttactgctgggagaagaatcatttagcactagtttatgagtacatggctcgaggcactctttgtgatcatctgagaggtaatcatggttttagtgaaaccttgaattggaaaacacgagtccgagttttggttgaagctgcacaaggactggattatctgcataaaggttgtagtccgccaataattcacggagatgtgaagacgagtaacattctgttggatcaaaatttacaagctaaaattgcagattttggtctttccaagacatatcttagcgacacacagacgcacatatcagtcaatccagctgggtcagctggttatatggaccctgggtactttcacacaggcagactcacggagagttgtgatgtttatagttttggaattgttctgttagagatagccaccggcgagtctcccatactaccaggtcaagaccacattattcagcgtgtgaataagaagattgctaccggtaatatcagcttggttgctgatgcacgactcagaggtgcctatgatatcagctcaatgtggaaggtggtggacatcggactgttatgcactactgacactggtgcaaaaaggccgacaatggctgctgtggttgtgcgactcaatgagagccttgcattggaggaagctcattgcgagagtggcttcaggggaagcacaggcacatcgtgtgataccacagtttcaacatctacgtttgggccttcagcaagatga

SEQ ID NO: 36 - protein, 856 aa, Oryza longistaminata
MELVEVEWHGEDISRQLRVRRLNAGFLSIDCGLEDTSGYKEDKTGIIYVSDGSYVDAGENHRVSAEEENAKLPRPYATLRSFPSGMRNCYTLPADAGAKYLVRVVSFYGNYDGKNSSSSLQFDLHLGTNYWATVRADGNNVYEALFVAWASWVPVCLVNTGRGTPFVSAVELRQLSGELYPGLNASQSLSMYGRRNMGSNISYTRYPHDRYDRYWWQVWSDPMWKNISTPSTIEQSSIFALPLPVIQTAVETVSNKTMLNITWQAETPRGFLVFLHFADFQNSQFRQFKVAFNNDYRDNYSPPYMTTDALFGLTRATSGMYSISIGATDASKLPPMLNAIEAYTLMSRDNPITFPNDFDTIMAIKHEYGIKKNWMGDPCFPTQFAWDGVKCNNASGNNTRIIYLDLSNNNLHGPISNNFTLLTALKYLNLSGNQLNAPIPKSLCENNNTGSLILSFDSDRETCTIIPPPTIKKLNKAILAISVVVPVMAIAILVLAYLIWRQKRKPNISIDDTPRERQAENVPASRKNHGNALLMVENRQFTYKELEKLTNKFERFIGQGGFGLVYYGLIEDGIEVAVKIRSESSCHGLDEFFAEVQSLTKVHHRNLVSLVGYCWEKNHLALVYEYMARGTLCDHLRGNHGFSETLNWKTRVRVLVEAAQGLDYLHKGCSPPIIHGDVKTSNILLDQNLQAKIADFGLSKTYLSDTQTHISVNPAGSAGYMDPGYFHTGRLTESCDVYSFGIVLLEIATGESPILPGQDHIIQRVNKKIATGNISLVADARLRGAYDISSMWKVVDIGLLCTTDTGAKRPTMAAVVVRLNESLALEEAHCESGFRGSTGTSCDTTVSTSTFGPSAR

SEQ ID NO: 37 - DNA, 2142 bp, Oryza longistaminata
  CDS (1)..(2142): homologue/similar gene in O. sativa: Xa21_Os07g0190000
atggcgctccaggcatcgtcgtcgccgtccttgttccgcgcgatcccgacgaacaccaacgcttcttgccggcgaaagtttcaggtcagggcgagcgcggcggcggcggcggcgaacggcggcggggatgggaaggtgatgatgaggaaggaggcggcgtcgggcgcgtggaagatcgactactccggcgagaagccggcgacgcctctgcttgacacggtgaactacccggtccacatgaagaacctctcgacgccggagctggagcagctggcggcagagctccgggcggagatcgtgcacacggtgtccaagacggggggccacctgagctccagcctgggcgtcgtcgagctcgccgtggcgctgcaccatgtgttcgacacgccggaggacaagatcatctgggacgtcgggcaccaggcgtacccgcacaagatcctgacggggcggcgttcgcggatgcacaccatccggcagacctccgggctcgccgggttcccgaagcgcgacgagagcgcgcacgacgcgttcggcgcgggccacagctcgacgagcatctcggcggcgctcgggatggcagtggcgagggacctcctcgggaagaagaaccacgtcatctcggtgatcggagacggcgccatgaccgccggccaggcgtacgaggcgatgaacaactcgggctacctcgactccaacatgatcgtggtgctcaacgacaacaagcaggtgtccctcccgacggcgacgctcgacggccccgccacgcccgtcggcgcgctgagcaaggcgctgacgaagctccagtcgagcaccaagctccgccgcctccgcgaggctgcgaagacggtgacgaagcagatcggcgggcaggcgcacgaggtggcggcgaaggtggacgagtacgcgcgcggcatggtgagcgcgtcgggctcgacgctgttcgaggagctcgggctctactacatcggccccgtcgacggccacaacgtcgacgacctcgtcgccatcttcaacaaggtgaagtcgatgccggcgccggggccggtgctcgtccacatcgtgacggagaaggggaagggctacccgccggcggaggccgccgccgaccggatgcacggcgtggtcaagttcgacccgacgacggggaagcagttcaagtccaagtgttcgacgctgtcctacacccagtacttcgccgaggcgttgatccgggaggccgaggccgacgacaaggtggtcggcatccacgccgccatgggcggcggcacggggctcaactacttccacaagaggttcccggagcggtgcttcgacgtggggatcgcggagcagcacgccgtgacgttcgccgcggggctcgccgccgaggggctcaagccattctgcgccatctactcgtcgttcctgcagcgcgggtacgaccaggtggtgcacgacgtcgacctgcagcggctgccggtgaggttcgccatggacagggcggggctcgtcggcgccgacgggcccacgcactgcggcgcgttcgacgtcgcctacatggcgtgcctcccgaacatggtcgtcatggcgcccgccgacgaggccgagctcatgcacatggtcgccaccgccgccgccatcgacgaccgccctagctgcttccgcttcccccgcggcaatggcattggcgccgtcctccctcccaaccacaagggcacacctctcgaggtcgggaaggggagggtgctcgtaggagggaacagggtggcgctgctagggtacggcacgatggtgcaggcatgcatgaaggcggcagaggcgctgaaggagcacggcatctacgtcaccgtcgccgacgcgcgtttctgcaagccgctcgacacagggcttatccgggagctcgccgccgagcacgaggtcctcgtcactgtggaggagggctccatcggagggttcggttcccacgtcgcccactacctcagcctcagcggcctccttgatggccccctcaagttgaggtccatgttcttgccagacaggtacatagaccatggtgcaccagtagaccagcttgaggaggcaggattgacaccaaggcacattgctgccactgtgctgtccttgcttgggaggccattggaggcacttcagctcagctga

SEQ ID NO: 38 - protein, 713 aa, Oryza longistaminata
MALQASSSPSLFRAIPTNTNASCRRKFQVRASAAAAAANGGGDGKVMMRKEAASGAWKIDYSGEKPATPLLDTVNYPVHMKNLSTPELEQLAAELRAEIVHTVSKTGGHLSSSLGVVELAVALHHVFDTPEDKIIWDVGHQAYPHKILTGRRSRMHTIRQTSGLAGFPKRDESAHDAFGAGHSSTSISAALGMAVARDLLGKKNHVISVIGDGAMTAGQAYEAMNNSGYLDSNMIVVLNDNKQVSLPTATLDGPATPVGALSKALTKLQSSTKLRRLREAAKTVTKQIGGQAHEVAAKVDEYARGMVSASGSTLFEELGLYYIGPVDGHNVDDLVAIFNKVKSMPAPGPVLVHIVTEKGKGYPPAEAAADRMHGVVKFDPTTGKQFKSKCSTLSYTQYFAEALIREAEADDKVVGIHAAMGGGTGLNYFHKRFPERCFDVGIAEQHAVTFAAGLAAEGLKPFCAIYSSFLQRGYDQVVHDVDLQRLPVRFAMDRAGLVGADGPTHCGAFDVAYMACLPNMVVMAPADEAELMHMVATAAAIDDRPSCFRFPRGNGIGAVLPPNHKGTPLEVGKGRVLVGGNRVALLGYGTMVQACMKAAEALKEHGIYVTVADARFCKPLDTGLIRELAAEHEVLVTVEEGSIGGFGSHVAHYLSLSGLLDGPLKLRSMFLPDRYIDHGAPVDQLEEAGLTPRHIAATVLSLLGRPLEALQLS

SEQ ID NO: 39 - DNA, 2520 bp, Oryza longistaminata
  CDS (1)..(2520): homologue/similar gene in O. sativa: Xa21_Os03g0109400
atggctgcggcagtggcaatgcgagggagtagcagtgatggaggtggctatgataaggtttccgggatggactccggtaaatatgtgcgctacacgcctgagcaggtggaggcgcttgagcgggtgtacgccgattgccccaagccaacctcctcccgcaggcagcaactgctgcgtgagtgccccatacttgctaacatcgagccgaagcagatcaaggtctggttccagaacagaaggtgccgggataagcagcggaaggagtcttcacggcttcaggctgtcaacaggaaattgacggcaatgaacaagcttcttatggaagagaatgaacgactccagaagcaggtctcccaattggttcatgagaatgcccacatgcgacagcagctgcagaatactccgctggcaaatgatacaagctgtgaatcaaatgtgactacccctcaaaaccctttaagggatgcaagtaacccctctgggctcctttcaattgcagaggagaccttgacagagttcctctcaaaggctactggtacagctattgattgggtccagatgcctgggatgaagcctggtccggattcggttggtattgtggccatttcacatggttgccgtggtgttgctgcccgtgcctgtggtttggtgaacctagaaccaacaaaagtggtagagatattgaaagatcgtccatcttggttccgtgattgtcgaaacctggaagtctttacaatgattccagcaggaaatggaggaacggttgaacttgtctacacacagttgtatgctccaacaactttagttcctgcacgagatttttggacgatacggtacacaaccacaatggaagatggcagtcttgtggtctgtgagagatctttaagtggttcagggggcggtccaagtgctgcctctgctcagcaatatgtgagagcggaaatgcttccaagtggatacctggttcgcccatgtgaaggtgggggatcaattgtgcacatagtggaccatctggatcttgaggcatggagtgttcctgaggtgcttcggccactctatgaatcttcaagggtagtcgctcagaaaatgactactgcggcactccggcacatcagacaaattgctcaagaaacaagtggggaagtggtgtatgccttggggaggcaaccagcagtgctacggacttttagtcaaaggctgagcagaggctttaacgatgccattagtggtttcaatgatgatgggtggtctataatgggcggagacggtgttgaagatgtagttattgcttgcaactcaactaagaaaattaggagtagcagcaatgctggcatcgcctttggagcccccggaggtattatatgtgctaaggcatcaatgttactgcagagtgttcctccagcagtactggttcgatttctgagggagcatagatctgaatgggccgattacaatattgatgcatatttggcttcaactctgaaaacaagtgcatgttcacttcctgggttgcgacccatgagattttctgggagccaaatcatcattccacttgctcacacagtcgagaatgaggagattcttgaagttgttcgccttgagggtcaacctcttactcatgatgaagctcttctttcaagggatatccacctgcttcagctctgcactggaatagacgagaagtctgtgggatcctcctttcagcttgtctttgcaccgattgatgatttcccagatgaaactccattgatttcttctggcttccgtgttataccacttgatatgaaaacagatggtgcatcctctggtaggacattagatttggcatctagtcttgaagtaggttcagcaacagctcaagcctccggagatgcatctgcagatgattgtaacttgcgatctgttctgacgatcgcttttcaattcccttatgagttgcatctccaagacagtgttgcagctatggctcgccaatatgtccgtagcattgtttctgctgtgcaaagagtgtcaatggctatctctccctctcaaactggtctaaatgccggacagaggataatctctggtttccctgaagcagcaacccttgctcgatgggtttgccagagctaccattaccatctaggggtagagttacttagtcaatcagatggagatgcagaacaattgttgaagatgctatggcattaccaagatgctattttgtgctgctcattcaaggaaaaaccggtgtttacatttgccaacaaagcaggactggacatgctagaaacttcccttgtcgccttacaggacctcacattggacaggatctttgatgagcctggaaaagaagcattgttctcaaacattcccaaattgatggaacagggccatgtctacctgccatcaggcgtgtgcatgtcaggaatgggtcggcatgtttctttcgatcaggccgtggcttggaaagtgcttgccgaggatagtaatgtccactgcctggccttctgtttcgtcaactggtcctttgtgtga

SEQ ID NO: 40 - protein, 839 aa, Oryza longistaminata
MAAAVAMRGSSSDGGGYDKVSGMDSGKYVRYTPEQVEALERVYADCPKPTSSRRQQLLRECPILANIEPKQIKVWFQNRRCRDKQRKESSRLQAVNRKLTAMNKLLMEENERLQKQVSQLVHENAHMRQQLQNTPLANDTSCESNVTTPQNPLRDASNPSGLLSIAEETLTEFLSKATGTAIDWVQMPGMKPGPDSVGIVAISHGCRGVAARACGLVNLEPTKVVEILKDRPSWFRDCRNLEVFTMIPAGNGGTVELVYTQLYAPTTLVPARDFWTIRYTTTMEDGSLVVCERSLSGSGGGPSAASAQQYVRAEMLPSGYLVRPCEGGGSIVHIVDHLDLEAWSVPEVLRPLYESSRVVAQKMTTAALRHIRQIAQETSGEVVYALGRQPAVLRTFSQRLSRGFNDAISGFNDDGWSIMGGDGVEDVVIACNSTKKIRSSSNAGIAFGAPGGIICAKASMLLQSVPPAVLVRFLREHRSEWADYNIDAYLASTLKTSACSLPGLRPMRFSGSQIIIPLAHTVENEEILEVVRLEGQPLTHDEALLSRDIHLLQLCTGIDEKSVGSSFQLVFAPIDDFPDETPLISSGFRVIPLDMKTDGASSGRTLDLASSLEVGSATAQASGDASADDCNLRSVLTIAFQFPYELHLQDSVAAMARQYVRSIVSAVQRVSMAISPSQTGLNAGQRIISGFPEAATLARWVCQSYHYHLGVELLSQSDGDAEQLLKMLWHYQDAILCCSFKEKPVFTFANKAGLDMLETSLVALQDLTLDRIFDEPGKEALFSNIPKLMEQGHVYLPSGVCMSGMGRHVSFDQAVAWKVLAEDSNVHCLAFCFVNWSFV

SEQ ID NO: 41 - DNA, 501 bp, Oryza longistaminata
  CDS (1)..(501): homologue/similar gene in O. sativa: Xa21_Os01g0184100
atggagagcgccatgttcgggctggagacgccgctgatgacggcgctgcagcacctgctcgacatccccgacggcgagggcggcgccgccgggaagcagggcgcgaccggtggccccacgcgtgcgtacgtgcgcgacgcgcgggccatggcggcgacccccgccgacgtgaaggatctccccggcgcgtacgcgttcgtggtggacatgcctgggctcaagtcctccgacatcaaggtgcaggtggaggaggagagggtgctggtgatcagcggcgagcggcggcgcggcggcggggaggaggagaaggaggagtcgtgcaagtacctgcggatggagcggcggatgggcaagttcatgcgcaagttcgtgctccccgacaacgccgacgtcgacaagatctccgccgtgtgccaggacggcgtgctcaccgtcaccgtcgagaagctcccgccgccggagcccaagaagcccaagaccatcgaggtcaaggtcgcgtga

SEQ ID NO: 42 - protein, 166 aa, Oryza longistaminata
MESAMFGLETPLMTALQHLLDIPDGEGGAAGKQGATGGPTRAYVRDARAMAATPADVKDLPGAYAFVVDMPGLKSSDIKVQVEEERVLVISGERRRGGGEEEKEESCKYLRMERRMGKFMRKFVLPDNADVDKISAVCQDGVLTVTVEKLPPPEPKKPKTIEVKVA

SEQ ID NO: 43 - DNA, 1950 bp, Oryza longistaminata
  CDS (1)..(1950): homologue/similar gene in O. sativa: Xa21_Os11g0703900
atggcgggcaagggcgagggtccggccatcggcatcgacctgggcacgacctactcgtgcgtgggcgtgtggcagcatgaccgcgtggagatcatcgccaacgaccagggcaaccgcaccaccccctcctacgtcggcttcaccgactccgagaggctcatcggagatgctgccaagaaccaggtcgccatgaaccccatcaacaccgtcttcgatgccaagcgtctcattggcaggaggtttagcgatgcttctgttcagagtgacattaagctctggcccttcaaggtgattgctggacctggtgacaagcctatgattgttgtccagtacaagggtgaggagaagcagtttgctgctgaagagatctcctccatggtcctcatcaagatgcgtgagattgctgaggcctaccttggcaccaccatcaagaatgccgttgtcactgttcctgcctacttcaatgactcccagaggcaggccaccaaggatgctggagtgattgctggtctcaatgtcatgcgtatcatcaacgagccgactgctgcagctattgcctatggtcttgacaagaaggccaccagcgttggtgagaagaatgtcctcatctttgaccttggaggtggtacctttgatgtttccctccttaccattgaggagggtatctttgaggtcaaggccacagctggtgacacccatcttggtggtgaagattttgacaaccgcatggtcaaccactttgtgcaagaattcaagaggaagaacaagaaggatatcactggcaaccccagggctctcaggaggttgaggacagcttgtgagagggcgaagaggacactgtcctccactgcccagaccaccattgagatcgattccctgtatgagggcattgacttctactcaaccatcacccgtgccaggtttgaggagctcaacatggatctcttcaggaagtgtatggagcctgtggagaagtgcctcagggatgctaagatggacaagagctctgttcatgatgttgtccttgttggtggctccactaggatcccgagggtgcagcagctcctgcaggatttcttcaacggcaaggagctttgcaagaacatcaacccagatgaggctgttgcttatggtgctgctgtccaggctgccatcttgagtggtgagggcaacgagaaggtccaggacctcctcctgttggatgtcacccctctctctctcggtttggagactgctggtggtgtcatgaccgtcttgatcccaaggaacaccaccattcccaccaagaaggagcaggtcttctccacctactctgacaaccagcctggtgtgctcatccaggtttatgagggtgagaggaccaggacacgtgacaacaacctgctgggcaagtttgagctctctggaatccctcctgctcccaggggtgttccacagatcactgtttgcttcgacattgatgccaatggtatcctgaacgtgtctgctgaggacaagaccaccgggcagaagaacaagatcaccatcaccaacgacaagggcaggctcagcaaggaggagattgagaagatggtccaggaggccgagaagtacaagtcagaggatgaggagcacaagaagaaggtggagtccaagaacgcgctggagaactacgcctacaacatgcgcaacaccatcaaggacgagaagatcgcctcgaagctaccggcagcggacaagaagaagatcgaggatgccatcgaccaggccatccagtggctggacggcaaccagctcgctgaggctgatgagttcgatgacaagatgaaggagctggagggcatctgcaaccccatcatcgccaagatgtaccagggcgctggcgcggacatggccggcggcatggacgaggacgatgctcccccggctggcggcagcggtgctggccccaagatcgaggaggtcgactaa

SEQ ID NO: 44 - protein, 649 aa, Oryza longistaminata
MAGKGEGPAIGIDLGTTYSCVGVWQHDRVEIIANDQGNRTTPSYVGFTDSERLIGDAAKNQVAMNPINTVFDAKRLIGRRFSDASVQSDIKLWPFKVIAGPGDKPMIVVQYKGEEKQFAAEEISSMVLIKMREIAEAYLGTTIKNAVVTVPAYFNDSQRQATKDAGVIAGLNVMRIINEPTAAAIAYGLDKKATSVGEKNVLIFDLGGGTFDVSLLTIEEGIFEVKATAGDTHLGGEDFDNRMVNHFVQEFKRKNKKDITGNPRALRRLRTACERAKRTLSSTAQTTIEIDSLYEGIDFYSTITRARFEELNMDLFRKCMEPVEKCLRDAKMDKSSVHDVVLVGGSTRIPRVQQLLQDFFNGKELCKNINPDEAVAYGAAVQAAILSGEGNEKVQDLLLLDVTPLSLGLETAGGVMTVLIPRNTTIPTKKEQVFSTYSDNQPGVLIQVYEGERTRTRDNNLLGKFELSGIPPAPRGVPQITVCFDIDANGILNVSAEDKTTGQKNKITITNDKGRLSKEEIEKMVQEAEKYKSEDEEHKKKVESKNALENYAYNMRNTIKDEKIASKLPAADKKKIEDAIDQAIQWLDGNQLAEADEFDDKMKELEGICNPIIAKMYQGAGADMAGGMDEDDAPPAGGSGAGPKIEEVD

SEQ ID NO: 45 - DNA, 1011 bp, Oryza longistaminata
  CDS (1)..(1011): homologue/similar gene in O. sativa: Xa21_OsI_34361
atggcagcggcggcggcgaggtacgacgtggagaagggagggaggaagagggagggggaggaggagaggtacggttcgccggcggcggtggcgcagtacccgcagcgggagggggagagggagtgggtgccgtggctcgtgccggccatcctcgtcgccaacgtcgtcgtcttcgccgtcgccatgtacgtcaacaactgccccagctcccacgcctctcgcggccgccgaggcggcgcgtgcgtcgccggattcctccgccgcttctccttccagcctctctccgagaacccgctcctcggcccctcctccgccacattgcagaagatgggagcactggtatgggacaaggttgttcatgagcatcagggatggaggctagtgacctgcatctggctgcacgctggtgttgttcatctgcttgccaacatgctgagcctcgtgctcatcggactcaggctcgagcagcagtttggatacatgagaattggcatcatctaccttgtttctggcattggaggcagcgttctttcatctctgttcatcagaaacagcatctccgtcggtgcttctggcgctctctttggtcttcttggagccatgctgtcagagcttttcaccaactggaccatatacacgaacaaggctgcagctctagtgacgctcttgatcgtcatcgcgatcaacctcgccatcggcatcctccctcacgtcgacaacttcgcccacatcggagggttcttgactgggttcctcctcggattcatcttcctgatgcgcccacactacggatggatgcagcgatatgtcctgccttcctctgtcaagtacacctccaagaagtacctggcttatcaatggatcttgctggccatggcctcggtcctagctgtcatcggattcgccgttgggctgtcgatgctcttcagaggggtgaatgctaatgaacgctgccattggtgccactacctgagctgcattcctacctcgagatggacctgcgggaactga

SEQ ID NO: 46 - protein, 336 aa, Oryza longistaminata
MAAAAARYDVEKGGRKREGEEERYGSPAAVAQYPQREGEREWVPWLVPAILVANVVVFAVAMYVNNCPSSHASRGRRGGACVAGFLRRFSFQPLSENPLLGPSSATLQKMGALVWDKVVHEHQGWRLVTCIWLHAGVVHLLANMLSLVLIGLRLEQQFGYMRIGIIYLVSGIGGSVLSSLFIRNSISVGASGALFGLLGAMLSELFTNWTIYTNKAAALVTLLIVIAINLAIGILPHVDNFAHIGGFLTGFLLGFIFLMRPHYGWMQRYVLPSSVKYTSKKYLAYQWILLAMASVLAVIGFAVGLSMLFRGVNANERCHWCHYLSCIPTSRWTCGN

SEQ ID NO: 47 - DNA, 822 bp, Oryza longistaminata
  CDS (1)..(822): homologue/similar gene in O. sativa: Xa21_OsI_09185
atggccgacgggggagagaagtgccgggacgcggccggcgagggcggcggcggcggcgacctgtacgccgtgctcgggctcaagaaggagtgctccgacgccgacctcaagctcgcgtaccggaagctcgccatgagatggcatccggacaaatgctcatcctccagcagtgcaaagcacatggaggaagccaaggagaagttccaggagatccagggcgcctattccgtcctctcagactcaaacaagcggttcctctacgacgtgggggtatatgatgatgacaacaatgacgatgacaacctgcaggggatgggggacttcattggtgagatggcccagatgatgagccaggcacggccaacgaggcaggagagctttgaagaactgcagcagctattcgtagacatgttccaagctgatcttgattcgggtttctgcaatggaccctcaaagtgctaccatacccaggcccaaagccagactcgaacatcctcaacctccccttcgacgtcaccgtctccaccgcctccagtagctactgaggcagaatcgccatcatgtaatggtattaataagcgtggttcatcagcaatggactctgggaagcctccaagagccagcgaagtcggtgctggacagagtcaatcagggttttgtttcgggcagaagagtgatgctaaacaagcggcgaagacgcgaagcgggaacacggccagccggaggaggaacggccggaagcagaaggtgtcgtcgaagcacgacgtctcgtctgaggacgagatgccaggtcacccttacactgttaaagctaaaaactaa

SEQ ID NO: 48 - protein, 273 aa, Oryza longistaminata
MADGGEKCRDAAGEGGGGGDLYAVLGLKKECSDADLKLAYRKLAMRWHPDKCSSSSSAKHMEEAKEKFQEIQGAYSVLSDSNKRFLYDVGVYDDDNNDDDNLQGMGDFIGEMAQMMSQARPTRQESFEELQQLFVDMFQADLDSGFCNGPSKCYHTQAQSQTRTSSTSPSTSPSPPPPVATEAESPSCNGINKRGSSAMDSGKPPRASEVGAGQSQSGFCFGQKSDAKQAAKTRSGNTASRRRNGRKQKVSSKHDVSSEDEMPGHPYTVKAKN

SEQ ID NO: 49 - DNA, 909 bp, Oryza longistaminata
  CDS (1)..(909): homologue/similar gene in O. sativa: Xa21_Os06g0682900
atggcgatgcggcggtggagagaggatgcggtggcgctgtcgctgcgcgggtgcgggttcggcgacggggacgacgaccggccggagaagccgcggcggtacggggtgacggagatgaggagccccttgtacgccttccgccccgcccaccacgcgctccaggaaatattggattccctaggtccttttgttgatggtttgaagtttactggtggatctcatagtttgatgggaaaagaactggttagagagattaccgatttagcacacaagcatgacatatatgtgagtacaggagattgggcagagcatcttctgcatcaaggaccttcttttttcaagcaatatgtcgaggagtgcaaggcattaggatttgacaccatcgagctgaatgctggatctctcaagctcccggaagaagctctcctgagattagtccgcctcatcaagactagtggtttgcaagcaaagcccctgttttcagtgaagtttgacagttctgatattcctccatcaggagatagggcatttggggcatacatagttccagtgaagcagaattcagaaagagttgaggatgttgacctgttgataaggagagccgagaggtgcttggaagcaggggcagacatgatcatgatcgatgccgatgacatttgccagcgcgccgactctctacgggcagacatcgtcgccaagatcgtaggccggctagggctcgagaagaccatgttcgaggcttccaaccccaacacctccgagtggttcgtcagaagatacgggccacgggtgaatctgttcgtggatcactccgacgtgatgaacctggagcgtctccgaggcttcaatatgcgtggagtctgcaactctcccttgttcggaatcggctcgcccttcttcctgatgtga

SEQ ID NO: 50 - protein, 302 aa, Oryza longistaminata
MAMRRWREDAVALSLRGCGFGDGDDDRPEKPRRYGVTEMRSPLYAFRPAHHALQEILDSLGPFVDGLKFTGGSHSLMGKELVREITDLAHKHDIYVSTGDWAEHLLHQGPSFFKQYVEECKALGFDTIELNAGSLKLPEEALLRLVRLIKTSGLQAKPLFSVKFDSSDIPPSGDRAFGAYIVPVKQNSERVEDVDLLIRRAERCLEAGADMIMIDADDICQRADSLRADIVAKIVGRLGLEKTMFEASNPNTSEWFVRRYGPRVNLFVDHSDVMNLERLRGFNMRGVCNSPLFGIGSPFFLM

SEQ ID NO: 51 - DNA, 1317 bp, Oryza longistaminata
  CDS (1)..(1317): homologue/similar gene in O. sativa: Xa21_Os01g0134700
atggcggcgaagcggcttcacgacggctacggacaggaggaccagcccgacgacaagcgtgtgcgccgcatgccgtccttctcgacggtgatccgtgaggccttgatggtgaagcagatgcagactctgttcgtcgcactggagccacttctccgtagagtggtgcaggaggagctccaggcaggtctcgtgcgcagcccgcgttacatcgagaggatgtcgcctgagacgccgccggctcagccgccgatgtggaagctggcgttccggttcaagccgcagctcccgatcttcaccgggagcaagatcgaggacgtgaacggcaacccactggagatcatcctcatcgacgtcgacaccggcgcgccggcgacgatctcgcagcctctgcgcgtcgaggtcgtcccggtcctgggcgacttcccgccggacgaccgcgagcactggacggcggaggagttccagcagaggggcatcgtgaaggagcgctccggcaagcgcccgctcctcaccggcgacgtcagcctcaccatgcgcgacggctgcgtcgccgtgaacgagctccagttcacggacaactcctcctgggttcgctgccgcaggttccgcatcggcgtccgcgtcgtgccgggcagctacgacggcccaagaatcggcgaggccatgaccgagcccttcgtcgtcagagaccaccgcggcgaactgtacaggaagcactaccctcccgttcttggcgacgatgtctggaggcttgagaagattggcaaggagggtgccttccacaggaagctgacgcagcacaacgtcaggaacgtgcaggagttcttgcggctgctcacggttaagccggacgagctgcgcgctatcatgggcgacggcatgaccgatcgcatgtgggaggtgacgacgagccacgccaagaagtgcgtccccggcgacaaggtgtacatgtacagcacgcagcacggcaccgtctacgtcaactccatcttcgagctcgtgaaggtcgagctcgccggcgttgagtaccagctgcaccagctgaacaggggtcagagggcgttcgtgcatcagctgctgctggcggcgtacgagcagcgaaacaacctccaagaggccgacgccatggcgctccactgcaacgacgttcctctgctgcagaatgcagcggagataactatcccggcgcttggagacacgcagctgtggattcagaacagtctcaacagccaagaaatcgacttccaggtcgacgagatcccccaagctaactttgcgcttcagtggactggccaaatgtacaacatttcaggctaa

SEQ ID NO: 52 - protein, 438 aa, Oryza longistaminata
MAAKRLHDGYGQEDQPDDKRVRRMPSFSTVIREALMVKQMQTLFVALEPLLRRVVQEELQAGLVRSPRYIERMSPETPPAQPPMWKLAFRFKPQLPIFTGSKIEDVNGNPLEIILIDVDTGAPATISQPLRVEVVPVLGDFPPDDREHWTAEEFQQRGIVKERSGKRPLLTGDVSLTMRDGCVAVNELQFTDNSSWVRCRRFRIGVRVVPGSYDGPRIGEAMTEPFVVRDHRGELYRKHYPPVLGDDVWRLEKIGKEGAFHRKLTQHNVRNVQEFLRLLTVKPDELRAIMGDGMTDRMWEVTTSHAKKCVPGDKVYMYSTQHGTVYVNSIFELVKVELAGVEYQLHQLNRGQRAFVHQLLLAAYEQRNNLQEADAMALHCNDVPLLQNAAEITIPALGDTQLWIQNSLNSQEIDFQVDEIPQANFALQWTGQMYNISG

SEQ ID NO: 53 - DNA, 549 bp, Oryza longistaminata
  CDS (1)..(549): homologue/similar gene in O. sativa: Xa21_Os01g0135700
atgtcgaacaccaccgagacgaagatgccgcagcagcagcagcaggttgagaagccgacggcgttggcgccggcggacgcggagatcgagagggtcttcacccgcttcgacgcggacggggacggcaggatctccccctcggagctcgccgcggtgacgcgcgccatcgcgccgccgcccagcgagtcggccggcggccgcgaggtggccgccatgatggacgagctcgacaccgaccgcgacggcttcgtcgacctcggcgagttcgcggcgttccacggccgcgggcgcggggacgccgagcacgaggccgagctgcgcgccgcgttcgacgtgtacgacgtcgacggcgacggccgcatcaccgcggccgagctcggcaaggtcctcgcccggatcggcgagggctgcagcgccgaggagtgcgagaggatgatcgcctccgtcgacgtcgatggcgatggctgcgtcgggttcgaggagttcaagaagatgatgtcccgtgatgccgctgcaaccggcggcgctgacaaggccaagacggagtaa

SEQ ID NO: 54 - protein, 182 aa, Oryza longistaminata
MSNTTETKMPQQQQQVEKPTALAPADAEIERVFTRFDADGDGRISPSELAAVTRAIAPPPSESAGGREVAAMMDELDTDRDGFVDLGEFAAFHGRGRGDAEHEAELRAAFDVYDVDGDGRITAAELGKVLARIGEGCSAEECERMIASVDVDGDGCVGFEEFKKMMSRDAAATGGADKAKTE

SEQ ID NO: 55 - DNA, 1710 bp, Oryza longistaminata
  CDS (1)..(1710): homologue/similar gene in O. sativa: Xa21_Os01g0534800
atggatttcgagctgcgcaaggcgcgggagaagctggagcgggagcagcgggagcgcgtgcagcacgccaaggccaaggccgaacgcgagcgccgcgccaaggccgaggccgcgcgccgccgcgacgcgctcgaggcgtcccaccgcgagcgccgcctcgacgccgcgcgcgcgcaggaagaggctcagcaaaagatggaagaggtgatgcaacttggaaaggggatttctttctcgcacatgtttgaagctcttcgatatgatggtcctggggacaagatcaagttgccaccatcgtcttttaaggaattgtctgatgaaggagcactggacaaaggtcccatgtacttcaggttgtcaaaggttagagacagtgttccgggtgcccctcaggatcatgatgccgatgaggcaacatgttgtggtgttcttgagttcactgcaagggaaggctccgcagaactcactccacatgtgtggaacaatctgttccggggtgatagcccagatgttcctctgattgaggttaggtatgtcagtttacccaaagggacatatgcgaagctgaagccagtaggagtggggttctcagaccttcctaaccatagggctgtccttgaaacggcactccgcaatcatgcaacactatctgaaaatgattttgttgtggtgaattatgggcaactgcaatacaagttgaaggttcttgaattaaaacctgcatcaagtgtttctgtcctggagacagatgtggaagttgacattgaaggaccagattcagttttggacaacgtagagaatcaacatgtgcttgtgccacttgagactggaaaggttgaatctggagttgtggaagaaggaaagtttaggtactacaaatttcttgttgatgaaggtatgggtgagaaagtagtttctaggcatgcaaatattgaggttaagatagagacagatacaagtggtggtgacactgatatttatgtatcaaggcatcctttagttttcccaactcagcaccgtcacgaatggtcttctcatgaaatgggatctaaggtcctcatactgaaaccaagggatgccagtctcgccagtggtacctacagtattggagtttatggtttcaagggaaccactaaataccaactttctgtggctattaaagatgttcttaatggccaaaggattggtgagcaggctagtgcctcatctagtgttgatgttgattcagtggtgtgcaagaactgcaaacgctatatatccagccgaacttcactacttcatgaagcatactgtgtgagacacaatgttgtttgcatgcatgatgggtgtggtgttgttcttcgaaaggaggaagcaacagatcacgtgcattgcaacaagtgtgggcaagctttccagcagagagaaatggagaagcacatgaaagttttccatgagccactacaatgcccttgcggggtggtccttgaaaaggaagatatggttcaacaccaatcctcaacctgccctttgcgcttgattgtgtgccgattttgtggtgacactgttcaagctggtggagaaccacttgatgctcgggatcggcttcgcaacatgtgtgagcacgagagtatctgtggatccaggactgcaccatgtgattcttgtggacggtcagtcatgctgaaggacatggacattcatgtgattgctgtgcatcagaagagctaa

SEQ ID NO: 56 - protein, 569 aa, Oryza longistaminata
MDFELRKAREKLEREQRERVQHAKAKAERERRAKAEAARRRDALEASHRERRLDAARAQEEAQQKMEEVMQLGKGISFSHMFEALRYDGPGDKIKLPPSSFKELSDEGALDKGPMYFRLSKVRDSVPGAPQDHDADEATCCGVLEFTAREGSAELTPHVWNNLFRGDSPDVPLIEVRYVSLPKGTYAKLKPVGVGFSDLPNHRAVLETALRNHATLSENDFVVVNYGQLQYKLKVLELKPASSVSVLETDVEVDIEGPDSVLDNVENQHVLVPLETGKVESGVVEEGKFRYYKFLVDEGMGEKVVSRHANIEVKIETDTSGGDTDIYVSRHPLVFPTQHRHEWSSHEMGSKVLILKPRDASLASGTYSIGVYGFKGTTKYQLSVAIKDVLNGQRIGEQASASSSVDVDSVVCKNCKRYISSRTSLLHEAYCVRHNVVCMHDGCGVVLRKEEATDHVHCNKCGQAFQQREMEKHMKVFHEPLQCPCGVVLEKEDMVQHQSSTCPLRLIVCRFCGDTVQAGGEPLDARDRLRNMCEHESICGSRTAPCDSCGRSVMLKDMDIHVIAVHQKS

SEQ ID NO: 57 - DNA, 1713 bp, Oryza longistaminata
  CDS (1)..(1713): homologue/similar gene in O. sativa: Xa21_Os01g0570800
atgactctgcggccactcaacacagagagaagcttcctcctctcctccccgaagccacacagccccagggatgcctgctcgccgccggtgaggtcgccctcctccaccaggctcctcgcctgcaggaagctcccctcctcctccaccaacagcaagcccatggccaccggcgccggcgtcctcgagaggtctctcagcttcaagaactgggagcccaccgcggcggaggtcgccgcgccgccgccgcacgatgaggcggcgagccggtgcatcaacggcgcgcggccggggatcctgctgctgcagcagagccccaaggccaagcagggcgacgccgccgcgacgtcgccggcgcaggccgcgctgatcgagttcatctcgccgaagccgcggtcggagctggaccaggcggcgaccaaggtgcagaagctgttcaaggggcaccgcacccggcggaacctcgccgactgcgccattgtcgtggaggagctgtggtggaaggcctacgactccgcctgcctcaacatcaagtccatctccttcttcgacgaggccaagcaggagaccgcggcgtcgcgctggtccagggccggcaagcgcatcgccaaggtcggcaagggcctctccaagaacgagaaagcccagaagctcgcgctccagcactggctcgaagctatcgacccgcgccaccgctacggccacaacttgcatctgtactacgacatctggtctgcgagttcgagcactgagccattcttttactggctggatgtaggagctgggagagacatgcatcaccaaaagtgcccgagaagcaagctttattcacagctgatcatgtaccttggaccaaacgagagggaggcttttgaagttgttgtggagggtgggaagctgatgtacaggaagagtggagttcttgtgaacaccactgaagattccaagtggatatttgtgttgagcacaacaagatcattatatgttggacagaagaagaagggtaaatttcagcactcaagtttcctagctggggcagctacaacggctgctggaagattggttgccaaagatggtgttcttcaggcgatatggccatacagcggtcactacctcccaacagaagagaacttcagagagttcatcagcttcttggaggagaacagtgttgatcttgccgatgtcaagagatgttcggtcgacgacgatgaattcccgtcattcaagaagacagaggagaaaccagaggaagctgagaagcctactgaacccacacatgatgagatcatggacagctcacagattgagctgcctgaggtagacatagtgaaggaagcggttgtcgaaaacagcgaggacaccgaggtggcaccgatcatggccagccgcccatccttcaaatgggcaaccgcgaatggcgctcgcattggctgtgtccgggactacccggctgatctccagagcatggcccttgagcatgtcaatctttcaccaagagtggtgccctctcctactacaaacaggctgccgataccgtctcctcggccaagcccgaagatcaggctgtcacctaggctgcactacatgggtctcccgacgcctaccggttgcaagctcccgatcccgagcccggagatcaggaggtcaccaagggatcagttcatggggtttcagacaccgtcagtgtctctcacactcccaaagcttgggaagtga

SEQ ID NO: 58 - protein, 570 aa, Oryza longistaminata
MTLRPLNTERSFLLSSPKPHSPRDACSPPVRSPSSTRLLACRKLPSSSTNSKPMATGAGVLERSLSFKNWEPTAAEVAAPPPHDEAASRCINGARPGILLLQQSPKAKQGDAAATSPAQAALIEFISPKPRSELDQAATKVQKLFKGHRTRRNLADCAIVVEELWWKAYDSACLNIKSISFFDEAKQETAASRWSRAGKRIAKVGKGLSKNEKAQKLALQHWLEAIDPRHRYGHNLHLYYDIWSASSSTEPFFYWLDVGAGRDMHHQKCPRSKLYSQLIMYLGPNEREAFEVVVEGGKLMYRKSGVLVNTTEDSKWIFVLSTTRSLYVGQKKKGKFQHSSFLAGAATTAAGRLVAKDGVLQAIWPYSGHYLPTEENFREFISFLEENSVDLADVKRCSVDDDEFPSFKKTEEKPEEAEKPTEPTHDEIMDSSQIELPEVDIVKEAVVENSEDTEVAPIMASRPSFKWATANGARIGCVRDYPADLQSMALEHVNLSPRVVPSPTTNRLPIPSPRPSPKIRLSPRLHYMGLPTPTGCKLPIPSPEIRRSPRDQFMGFQTPSVSLTLPKLGK

SEQ ID NO: 59 - DNA, 1275 bp, Oryza longistaminata
  CDS (1)..(1275): homologue/similar gene in O. sativa: Xa21_Os01g0597600
atggcagatcagaaggtgattctcgccgagccgctgcttccggggaaggaagctgacttcgccgacgacgacgacgtggaggcgcagctcacttcgtaccacaccggcgcctccttctccaggacgtgcctcaacctcaccaatgccgtctccggcatcggggtgctgtccatgccgtacgcggtgtcgcagggcgggtggctcagcctgctgctcttcgtcctcgtcggcgccgtgtgctactacaccggcacgctcatcgagcgctgcatgcgcgccgacggctccatcgccagctacccggacatcggccagtacgccttcggcgccaccggcaggagagccgtcgcattcttcatgtacgtcgagctctacctcgtcgccataagcttcctcgtcctcgagggcgacaatctcgacaagctcttccccggcgcaaccatggagattcttggctaccagctccacggcaagcagctattcattgtactcgccgccgccgtcatactgcccactacctggctcaagaatcttggcatgctcgcttacgtgtcagcggccgggctcatcgcctcggtggccttgacggcgtcactgatctgggccggtgtcgccgagaccgggttccaccggaacagcaacacgctcaacctcgccggaatccccacctccctcggtctctacttcgtctgcttcaccggccacgccgtcttcccgacgatatactcctccatgaagaacagcaaacacttctccaaagttctcttgatctcgtcggtgctgtgcagcctcaactacgggctcacggcggtgctgggctacatgatctacggtgacgatgtgcagtcgcaggtgacgctgaacctgccctccggcaagctctacaccaagatcgccatcgtgatgacgctggtgaacccgttggccaagtacgcgctgctcgtggcgccgatcacggcggccgtcgaggagaggctgtctctgacgcggggcagcgcgccggcgagggtggccatcagcaccgccatcctcgccagcacggtggtggtggcgtcgacggtgcccttcttcggctacctcatgtcattcatcggctcgttcctcagcgtcatggcgaccgtgctgttcccttgcctctgctacctcaagatctacaaggccgatggcatccaccgcacggagatggtggccatcgccggaattctgctgctaggagtgttcgtcgccgtcaccggcacgtacacttctttgctgcagattatagccactttctga

SEQ ID NO: 60 - protein, 424 aa, Oryza longistaminata
MADQKVILAEPLLPGKEADFADDDDVEAQLTSYHTGASFSRTCLNLTNAVSGIGVLSMPYAVSQGGWLSLLLFVLVGAVCYYTGTLIERCMRADGSIASYPDIGQYAFGATGRRAVAFFMYVELYLVAISFLVLEGDNLDKLFPGATMEILGYQLHGKQLFIVLAAAVILPTTWLKNLGMLAYVSAAGLIASVALTASLIWAGVAETGFHRNSNTLNLAGIPTSLGLYFVCFTGHAVFPTIYSSMKNSKHFSKVLLISSVLCSLNYGLTAVLGYMIYGDDVQSQVTLNLPSGKLYTKIAIVMTLVNPLAKYALLVAPITAAVEERLSLTRGSAPARVAISTAILASTVVVASTVPFFGYLMSFIGSFLSVMATVLFPCLCYLKIYKADGIHRTEMVAIAGILLLGVFVAVTGTYTSLLQIIATF

SEQ ID NO: 61 - DNA, 426 bp, Oryza longistaminata
  CDS (1)..(426): homologue/similar gene in O. sativa: Xa21_Os01g0612900
atggcattcgccggggacgcgcggatcgtcgtcgccgtggcggcggtggcggcgttcgtcctcgtcggcgtggcggcggaggggaagggggaggggggaggaggaggggtgggggtgtgcttcgagaggatattcagcttcggggactcgctgacggacaccggcaacttcctgctctccgtgccggaggacttcccggaccccgcccgcagcctcccctacggccagaccttcttcggccgcccctccggccgctactccgacggccgcaacctcctcgacttcttcggtatcatccccctcctcctcttcatttcatttttcttcagattttttttctctcatcctgccatccgggaccgggacccccttcggcttccctgtttgttttgtttattctgttggtgtcgggtccccctctggtaa

SEQ ID NO: 62 - protein, 141 aa, Oryza longistaminata
MAFAGDARIVVAVAAVAAFVLVGVAAEGKGEGGGGGVGVCFERIFSFGDSLTDTGNFLLSVPEDFPDPARSLPYGQTFFGRPSGRYSDGRNLLDFFGIIPLLLFISFFFRFFFSHPAIRDRDPLRLPCLFCLFCWCRVPLW

SEQ ID NO: 63 - DNA, 1389 bp, Oryza longistaminata
  CDS (1)..(1389): homologue/similar gene in O. sativa: Xa21_OsI_02945(Os01g0629400)
atgcctgcattaaggatgaataaaatgttaagcaccgactatttagggacgcaggagcttcattcattttgcaagaccaccgaaatattggaagactcacagtctcaagagattgcactcgatagaacagcggtggggtcaacacttctaagtcatcaaaatgtttgctctacttctgaagtatcagggggaaactttggaatcgctgaagtcagttttttacaggatgaatatgatgcagaaaccaccggtgtactgccaccatcatttttgtcctgtggctctagatctatgctccctatatcagtaccatcatcatcatcatctagtctggagactgtcctcttatctgactcaacgtacagcgatcttcaggtaaaagagacgaaccacaattctacagcaatggatgaaaacaatgagttccttcagctgattcttagtagcaatgatgaaggatacaatgctggaagtgaattccaagtttgggatgttctggacttctacttctcagaaagcttttcagctgtgcagtttgatagcttgatgggttttacaaatgatgttagttcttcccatcacgattgtatgaatcttgttgacatggtagagcggcctgttgcgctcctgtccctaaatgataccgaggagcaaaataactctactgatgagttccctgatgatacatcatcataccttcaaatgaaaccctcagattccgaaactgaaagtaattatgcctctcgagatgttgcggtaactgaatatgttgatgaaaagccactttctagaggcctgcctgatttaatggatgtcgactcacccggtcgtctatcaaaatcagcaagatcaaaacaaatcactcttgttctggatttggacgagactcttgtacattcaacattggatcattgtgacaatgttgatttcacccttcaagttttctttaatatgaagaaccatacagtttatgttaggcaaagacctcatctgaagatgtttcttgagaaggtagctcagatgtttgagcttgtcattttcacagctagccagagaatttatgccgagcaactaatagatagactcgaccctgatgggaggttgatttcacaccgtatttatcgtgagtcatgtatattctctgagggttgctatacaaaggatctgacaattcttggagttgacctggcaaaagttgtaatagttgacaatactccacaggttttccagttgcaagtggacaatggtataccaataaagagctggtttgatgacccctcagaccaggaattggtcgagttactcccattcctggagacacttcttggtgtggaggacgttaggccaataatctcgaagacattccaccatacacctgagcagaattag

SEQ ID NO: 64 - protein, 462 aa, Oryza longistaminata
MPALRMNKMLSTDYLGTQELHSFCKTTEILEDSQSQEIALDRTAVGSTLLSHQNVCSTSEVSGGNFGIAEVSFLQDEYDAETTGVLPPSFLSCGSRSMLPISVPSSSSSSLETVLLSDSTYSDLQVKETNHNSTAMDENNEFLQLILSSNDEGYNAGSEFQVWDVLDFYFSESFSAVQFDSLMGFTNDVSSSHHDCMNLVDMVERPVALLSLNDTEEQNNSTDEFPDDTSSYLQMKPSDSETESNYASRDVAVTEYVDEKPLSRGLPDLMDVDSPGRLSKSARSKQITLVLDLDETLVHSTLDHCDNVDFTLQVFFNMKNHTVYVRQRPHLKMFLEKVAQMFELVIFTASQRIYAEQLIDRLDPDGRLISHRIYRESCIFSEGCYTKDLTILGVDLAKVVIVDNTPQVFQLQVDNGIPIKSWFDDPSDQELVELLPFLETLLGVEDVRPIISKTFHHTPEQN

SEQ ID NO: 65 - DNA, 324 bp, Oryza longistaminata
  CDS (1)..(324): homologue/similar gene in O. sativa: Xa21_Os01g0631800
atggctgctggcgtgggcaaggtgggggagtggataaggaggcggatgatgccgcggaggagcaagagcaaggcggccggcccgagccggagccggagcgacggcgacggcgacggcggcgaggccttgccgttgccggcgccaccgcagaggaagctccgggcgcgggcgttgccggcggcgttgcggtggcggccgcgggggcgcgtgctggcggtgctgtacgagaaggtggtgtaccacctgctgtggctggtggagtccgtcgtcgtcgtcgccaggctctgcttcttcgtcatgcgcttcggcctcaagcagctctga

SEQ ID NO: 66 - protein, 107 aa, Oryza longistaminata
MAAGVGKVGEWIRRRMMPRRSKSKAAGPSRSRSDGDGDGGEALPLPAPPQRKLRARALPAALRWRPRGRVLAVLYEKVVYHLLWLVESVVVVARLCFFVMRFGLKQL

SEQ ID NO: 67 - DNA, 1122 bp, Oryza longistaminata
  CDS (1)..(1122): homologue/similar gene in O. sativa: Xa21_Os01g0717000
atggtggcgatcgagaaccagagccagggccagcgggcggcggaggcggcggcgcagccacggatccccagggaggcgcggcggctactgcacgagatggcggcgtcgtgggcggacgttgccgactgccgggcgctgcaggtgattccgctcaagggcgccatgaccaacgaggtgtaccaggtgcgctggctcaacggcgcccccgcccccgcaaccaccgccgccgccgaaggcggcgaggcggaggcggaggcggccgcaagggagagggaggtgaggaaggtcctcgtgcggatatacggcgacggcgtggagctcttcttcgaccgcgaggacgaggtgcgcaccttcgagtgcatgtctcgccatggccagggcccccgcctcctcggccgcttccccaacggccgcgtcgaggagttcatccacgcaaggacactatctgcagcagaccttcgtgatcctgaaatttcagctctggtggcgtcaaaactgagggaattccacaaccttgacatgcctggcccgaaatctgtactcatttgggaccgactaaaaaactggctcaaaactgcaaggaacctgtgctcatctgatgaatccaagaaatttcggctgggtagcctggagaacgagattgctgcattggagaaagaattttcaggggattaccacgggattggtttttgccacaacgatcttcagtatggcaacatcatgattgatgaagacaccaacatgttgactatcatcgattatgagtatgccagcttcaatccagttgcgtatgacatcgctaatcatttctgcgagatggcagcagactatcattcagagaagccacatgtactggactacagtaaatatccagacactgatgagcaggagcgttttgtgaagacgtacctaagcaattctgtaagtgaagaacctgatacggaagaggtggagaaccttctccaaagcattgagaaatacacgctcgccagtcatctagtttggggcctctggggaataatatcggatcatgtcaatgatattgacttcgactacaaggagtatgcaaggcagagattcgagcagtattggcagaagaagcaagcacttttaacttcatga

SEQ ID NO: 68 - protein, 373 aa, Oryza longistaminata
MVAIENQSQGQRAAEAAAQPRIPREARRLLHEMAASWADVADCRALQVIPLKGAMTNEVYQVRWLNGAPAPATTAAAEGGEAEAEAAAREREVRKVLVRIYGDGVELFFDREDEVRTFECMSRHGQGPRLLGRFPNGRVEEFIHARTLSAADLRDPEISALVASKLREFHNLDMPGPKSVLIWDRLKNWLKTARNLCSSDESKKFRLGSLENEIAALEKEFSGDYHGIGFCHNDLQYGNIMIDEDTNMLTIIDYEYASFNPVAYDIANHFCEMAADYHSEKPHVLDYSKYPDTDEQERFVKTYLSNSVSEEPDTEEVENLLQSIEKYTLASHLVWGLWGIISDHVNDIDFDYKEYARQRFEQYWQKKQALLTS

SEQ ID NO: 69 - DNA, 711 bp, Oryza longistaminata
  CDS (1)..(711): homologue/similar gene in O. sativa: Xa21_Os01g0797600
atggcgcccagagcagctacggtggagaaggttgctgtggcgccacccaccgggcttggtcttggcgtcggcggaggtgtcggagccgggggtcctcactacaggggcgtccgcaagcgcccgtgggggcgttacgccgcggagatccgtgacccggccaagaagagccgggtgtggctcggtacctacgacacggcagaggaggccgcccgcgcctacgacgccgccgctcgagagttccggggtgccaaggcaaaaacgaactttccgtttgcatcacagtcgatggtcgactgtggcggcagccccagcagcaatagcacggtagacaccggtggcggcggggttcagacgcctatgcaggccatgcctctgccgcctactctggacttggatttgttccaccgcgcggctgctgtgactgcagtcgccggcaccggcgttcgctttcctttcagaggatatcccgttgcacgtccagcaacgcatccttactttttctatgagcaggctgcagcggctgccgcagcagctgcggctggataccgtgtgatgaagcttgcaccgccggtcaccgtggcggcggttgcacaaagtgactccgactcctcgtcggtggttgatctcgcgccgtcacctccagcggttacggcgaacaaggcggcagctttcgatctggatctgaaccggccgccgccggtagagaactag

SEQ ID NO: 70 - protein, 236 aa, Oryza longistaminata
MAPRAATVEKVAVAPPTGLGLGVGGGVGAGGPHYRGVRKRPWGRYAAEIRDPAKKSRVWLGTYDTAEEAARAYDAAAREFRGAKAKTNFPFASQSMVDCGGSPSSNSTVDTGGGGVQTPMQAMPLPPTLDLDLFHRAAAVTAVAGTGVRFPFRGYPVARPATHPYFFYEQAAAAAAAAAAGYRVMKLAPPVTVAAVAQSDSDSSSVVDLAPSPPAVTANKAAAFDLDLNRPPPVEN

SEQ ID NO: 71 - DNA, 1728 bp, Oryza longistaminata
  CDS (1)..(1728): homologue/similar gene in O. sativa: Xa21_OsJ_04094
atggccgcggcggcggcgcagtccgtggcgtcggcttcgtcgtcgtccagccccgtcctgtcggccgcgcaccgccgccggctcaacgacgtcgagcgagacgcgttcgactacggcggcccgtgcgacgtcgacgtcgatcatgatgacgacgacggcggcggcggagtgcgccgcgggcacggcgccggcgtggcgggtgtcagggcgctgttctcgtcggccaggaggagcaagagggcgtccgtgattatcgatcaggcatggctgcggaacgtggtcgcgtgcctgctcggcctcaccgtcgtcgccgggctcgtgctgagctcgcaccgagtgagcggcgccggcggcgggaggctcgtgcagaggatggacctcggtgacggcgaagtgatgggctggacggaggagaacttgacggctgttgctcgccagtcacctgacacgccgatgaagatatggatgacgccagatagtgaaggttatggcaaatgcattgaacgcccaaagaaacatgacagaatgaacagtgcaacagctggttatataattgttaatgccaatggtggattgaaccagatgagactgggaataagcgacatggttgcagttgctaagctcatgaatgcaacactagtaatccctactctggatcacaaatcattttggactgatccaagtgatttcaaagatatatttgatgtggaacacttcaagaaaactttagagggtgacatttcgattgtggattccttgccactagcttataaaggattgaaactttatatgagagcacccacttcttgggccaaggcttcttactacagagctttctcaaggacactgaagaaggccaaagttgtgaaattcacacatacagattcacgaattgttaacaatggtctccccccatccatccaacgactccgttgtcgggcaaattatgaggcactaagattccacaaagaaattgaagagctgagtactgctctagttgatagacttaggaatggatccaatcattatatcgcacttcacttaaggtatgagaaggacatgctctcatttactggttgcagccacaacctaacacataaagaggcagatgagctgagagaaatgagactcaacgtgcggcactggaaagagaaggaaatcaacagtagggagaggagactccaaggacgctgccctatgactcctcgtgaagtagctcttttcctcaaagctatgggctatccttccagcacaaagatctatattgtagcaggtgaaatatatggtggacatagcatggattcattaaaggctgaatatccaaacatatatacacattatagtctggcaacggttgatgagttagagcctttcaagctataccaaaacagattagctgccttggactataatgtagccgtccaaagtgatgtttttgtgtatacgtatgatggaaatatggctaaagcagtacagggtcacagaagatttgaaggattccaaaaaaccatcaacccagacaggcagaagcttgtgggactcattgacaagcttgatgaaggtacactaacatggaatgagttccaaagtgaagtgaagatacatcatgaaaacagacttgggggtccatatcagaggttatctggtcgaagtccaaggcaagaggagtacttctacgcaaatccccttccagggtgcttgtgcaaaagaatgcaaaggattaaatga

SEQ ID NO: 72 - protein, 575 aa, Oryza longistaminata
MAAAAAQSVASASSSSSPVLSAAHRRRLNDVERDAFDYGGPCDVDVDHDDDDGGGGVRRGHGAGVAGVRALFSSARRSKRASVIIDQAWLRNVVACLLGLTVVAGLVLSSHRVSGAGGGRLVQRMDLGDGEVMGWTEENLTAVARQSPDTPMKIWMTPDSEGYGKCIERPKKHDRMNSATAGYIIVNANGGLNQMRLGISDMVAVAKLMNATLVIPTLDHKSFWTDPSDFKDIFDVEHFKKTLEGDISIVDSLPLAYKGLKLYMRAPTSWAKASYYRAFSRTLKKAKVVKFTHTDSRIVNNGLPPSIQRLRCRANYEALRFHKEIEELSTALVDRLRNGSNHYIALHLRYEKDMLSFTGCSHNLTHKEADELREMRLNVRHWKEKEINSRERRLQGRCPMTPREVALFLKAMGYPSSTKIYIVAGEIYGGHSMDSLKAEYPNIYTHYSLATVDELEPFKLYQNRLAALDYNVAVQSDVFVYTYDGNMAKAVQGHRRFEGFQKTINPDRQKLVGLIDKLDEGTLTWNEFQSEVKIHHENRLGGPYQRLSGRSPRQEEYFYANPLPGCLCKRMQRIK

SEQ ID NO: 73 - DNA, 1065 bp, Oryza longistaminata
  CDS (1)..(1065): homologue/similar gene in O. sativa: Xa21_Os01g0934100
atggcgcagaggacgctggagctgacgctgatctcggccaaggatctcaaggacgtgaacctcctctccaagatggaggtctacgccgtcgtctcgctctccggcgacccgcgctcgcggcagcggatcgccaccgaccgcgccggcggccgcaacccggcgtggaacgcctccccgctccggttcaccgtcccggcatccggcgccgggtccctccacgtcctcctccgcgccgagcgcgccctcggcgaccgcgacgtcggcgaggtccacatccctctctcggagctcctctccagcgcccccgacggcgccgtccccgccaagttcgtctcctaccaggtccgcaagatctcctccgggaagccacagggcgtcctcaatttctcctacaagatcggcgaggtaacccaatccggctcctaccctggtgcctctcctccggtcgcgtacggccaatctccaccggcgccagcctacccgccctccgccgccgccgccgccgcggcctacccgccccaatccacctacccaccaccgaccgcctacccaacggcagcgaaggccgatgggtcagccgccgcggcctacccaccccagtccgcctacccacctccgggtaagggaaacgagccatcgacggcttacccacctcccgccggctacccgccggcgaccggaagtagtaagccggcgaaggcgggtgagccggtgacggcctacccagccgccgcgggaccgagcaccgccgcgccaccgccgcagtacggctacggataccccgcccagccgccgccgccgcaagccggctacggctacccgcccccgccgccgcaagccgggtacggcggcggctacggctacccgccgcaggctgggtacggcggctaccagcagcaggccgtgaagccggcgaagaagaacaacttcgggatggggctcggagccgggctgctcggaggcgccctcggtggcctcctcatcggagacgccatctccgacgcgtcggcgtatgacgccggctacgacgccgggttcgacgacggcggtggcttcgatttctag

SEQ ID NO: 74 - protein, 354 aa, Oryza longistaminata
MAQRTLELTLISAKDLKDVNLLSKMEVYAVVSLSGDPRSRQRIATDRAGGRNPAWNASPLRFTVPASGAGSLHVLLRAERALGDRDVGEVHIPLSELLSSAPDGAVPAKFVSYQVRKISSGKPQGVLNFSYKIGEVTQSGSYPGASPPVAYGQSPPAPAYPPSAAAAAAAYPPQSTYPPPTAYPTAAKADGSAAAAYPPQSAYPPPGKGNEPSTAYPPPAGYPPATGSSKPAKAGEPVTAYPAAAGPSTAAPPPQYGYGYPAQPPPPQAGYGYPPPPPQAGYGGGYGYPPQAGYGGYQQQAVKPAKKNNFGMGLGAGLLGGALGGLLIGDAISDASAYDAGYDAGFDDGGGFDF

SEQ ID NO: 75 - DNA, 246 bp, Oryza longistaminata
  CDS (1)..(246): homologue/similar gene in O. sativa: Xa21_OsJ_05190(Os02g0123800)
atgatgaggaagcaatactctttcactctttgcctgatgctcctgcttgtggctgctctgctttgcaccatgaacaccatctccgtcgaagcaggaaggagtggttacaattcagtgaatcccgatggaaggagtggctacaattcagtcaatcccgatggaaggagtggttacaattcagtcaatccgaatgggaggggtggctacaattcggtcaatcccaatgacggcggtggcagcccatag

SEQ ID NO: 76 - protein, 81 aa, Oryza longistaminata
MMRKQYSFTLCLMLLLVAALLCTMNTISVEAGRSGYNSVNPDGRSGYNSVNPDGRSGYNSVNPNGRGGYNSVNPNDGGGSP

SEQ ID NO: 77 - DNA, 750 bp, Oryza longistaminata
  CDS (1)..(750): homologue/similar gene in O. sativa: Xa21_Os02g0125300
atggacgccttctactcgacctcgtcggcgtacggcgcggcggcgagcggctggggctacgactcgctgaagaacttccgccagatctcccccgccgtccagtcccacctcaagctcgtttacctgacactatgcgtcgcgctggctgcgtcggcggtgggcgcatacctgcacgtcgccttgaacatcggcgggatgttgaccatgctcgggtgcgtggggagcatcgcctggttgttctcggtgcctgtctatgaggagaggaagaggtttgggattctcttggccgctgccctgctggaaggggcttcagttgggcctctgatcaagcttgctgtagactttgactcaagcattctcgtaacagcatttgttggaactgccattgcgtttgggtgcttcacttgcgctgccattgttgccaagcgtagggagtacctctaccttggtggtttgctctcttctggcctctccatcctgctctggctgcagtttgccgcatccatctttggccactccaccggcagcttcatgtttgaggtttactttggcctgttgatcttcctggggtacatggtgtatgacacgcaggagatcatcgagagggctcaccacggtgacatggactacatcaagcacgcactcaccctcttcactgacttcgtggccgtccttgtccggatcctcgtcatcatgctcaagaacgcgtctgacaagtcggaggagaagaagaggaagaagaggtcttga

SEQ ID NO: 78 - protein, 249 aa, Oryza longistaminata
MDAFYSTSSAYGAAASGWGYDSLKNFRQISPAVQSHLKLVYLTLCVALAASAVGAYLHVALNIGGMLTMLGCVGSIAWLFSVPVYEERKRFGILLAAALLEGASVGPLIKLAVDFDSSILVTAFVGTAIAFGCFTCAAIVAKRREYLYLGGLLSSGLSILLWLQFAASIFGHSTGSFMFEVYFGLLIFLGYMVYDTQEIIERAHHGDMDYIKHALTLFTDFVAVLVRILVIMLKNASDKSEEKKRKKRS

SEQ ID NO: 79 - DNA, 318 bp, Oryza longistaminata
  CDS (1)..(318): homologue/similar gene in O. sativa: Xa21_Os02g0134300
atgggcaagaggaagtccagagcaaaaccacctcccaagaagagaatggacaagcttgatactgtcttttgctgtccattctgcaaccacggaagtagtgttgagtgtcgcattgatctaaagaacttaatcggcgaggcctcttgcagaatttgtttggaaacttttagcacagctgttaatgctctgactgaacccatcgacatatacagcgaatggatcgacgaatgcgagcgcgtgaacaaccctgaggaggacaacgccaaccactatgaagatgacaatgccagccgctaccgctacgacgaagaagaatag

SEQ ID NO: 80 - protein, 105 aa, Oryza longistaminata
MGKRKSRAKPPPKKRMDKLDTVFCCPFCNHGSSVECRIDLKNLIGEASCRICLETFSTAVNALTEPIDIYSEWIDECERVNNPEEDNANHYEDDNASRYRYDEEE

SEQ ID NO: 81 - DNA, 1173 bp, Oryza longistaminata
  CDS (1)..(1173): homologue/similar gene in O. sativa: Xa21_OSJNBa0023I17.12
atgggttgtttttgtatatttggcaagagaagggcaacccgacagcaaagttctcagcataatgatgacccctctggtgatacgaatataacaaaattcacttacaaggagctttcaagggttactgaaaattttagcccgtctaataagattggtgagggaggttttggatctgtgtataagggaatgctaaggaatggaaagcttgttgccgtcaaggtgctatctttagagtcaagacagggagccaaggaatttctgaacgaactcatggcaatttcaaacgtatctcatgaaaatcttgtcaagctttatggctattgtgtggaaggaaaccaaagaatccttgtctacaattatcttgaaaataatagccttgcacaaacacttttgggttatggccacagcaacagcaacatccagttcaactgggcaactcgagtaaatatttgtgttggtatcgcccgtggactaacatacctccatgaagttgtaaatccccacattgttcaccgggatatcaaagcaagcaatatacttctagataaagatcttacgccgaaaatatctgatttcggtttagcaaagcttttgcctccagatgcatcacatgttagcacaagggttgctggaacattaggttacttggctccagagtatgccattcgaggacaagtgacacggaagtcagatgtttatagttttggtgttctgttactagaaatagttagtgggagatccaacaccaatacaagattaccctatgaagatcagatacttcttgaaaggacatgggtgcactatgaagagggtgatttggagaaaatcatagacgcttctttgggtgatgacttggatgttgcacaagcctgtatgttcctgaaaattgggcttttgtgtacacaagatgtcacgaaacatcgacccacaatgtcgatggttgtccgcatgctaacaggtgaaatggatgttgagctggcgaagatcagcaagcccgcaataatcagtgactttatggatcttaaggtcaggagcatgaggaaagaagtggacatagtttcatcctcaacatccacattgctatcttccatcatggcacactcttctcctttgttgtcgcaagagacaacagaagcctccatgacattcactgcgatatcagatcgtgagtga

SEQ ID NO: 82 - protein, 390 aa, Oryza longistaminata
MGCFCIFGKRRATRQQSSQHNDDPSGDTNITKFTYKELSRVTENFSPSNKIGEGGFGSVYKGMLRNGKLVAVKVLSLESRQGAKEFLNELMAISNVSHENLVKLYGYCVEGNQRILVYNYLENNSLAQTLLGYGHSNSNIQFNWATRVNICVGIARGLTYLHEVVNPHIVHRDIKASNILLDKDLTPKISDFGLAKLLPPDASHVSTRVAGTLGYLAPEYAIRGQVTRKSDVYSFGVLLLEIVSGRSNTNTRLPYEDQILLERTWVHYEEGDLEKIIDASLGDDLDVAQACMFLKIGLLCTQDVTKHRPTMSMVVRMLTGEMDVELAKISKPAIISDFMDLKVRSMRKEVDIVSSSTSTLLSSIMAHSSPLLSQETTEASMTFTAISDRE

SEQ ID NO: 83 - DNA, 1053 bp, Oryza longistaminata
  CDS (1)..(1053): homologue/similar gene in O. sativa: Xa21_Os02g0181300
atggatccgtggattagcagccagccttcgctgagcctggacctccgcgtcgggctgccggcgacggcggccgtcgccatggttaagcccaaggtgctcgtcgaggaggacttctttcaccagcagcctctcaagaaagacccagaggttgcggcgctggaggcggagctgaagcggatgggcgcggagaaccggcagctgagcgagatgctggcggcggtggcggccaagtacgaggcgctgcagagccagttcagcgacatggtcaccgccagcgccaacaacggcggcggcggcggcggcaacaacccgtcgtccacctccgagggcggctccgtctcgccgtcgaggaagcgcaagagcgagagcctcgacgactctcccccgccgccgccgccgccgcacccacacgcggcgccgcaccacatgcacgtcatgcccggcgccgccgccgccggctacgccgaccagaccgagtgcacctccggcgagccctgcaagcgcatccgcgaggagtgcaagcccaagatctccaagctctacgtccacgccgacccatccgacctcagcctggtggtgaaagatgggtaccaatggaggaagtatggtcagaaggtcaccaaggacaacccctgcccaagagcctacttcagatgctcatttgctccggcctgccctgtcaagaagaaggttcagagaagcgcggaggacaacacgatcctcgtggcgacgtacgagggggagcacaaccacggccagccgccgccgccgctgcagtcggcggcgcagaacagcgacggctccggcaagagcgccgggaagccaccccatgcgccggcggcggcgccggcgccggcgccggtggtgccgcaccgtcagcacgaaccggccgtcgtcaacggcgagcagcaggccgcggcggcgtcggagatgatcaggcggaacctggccgagcagatggcgatgacgctgacgcgtgacccaagcttcaaggcggcgctcgtcaccgccctctccggccgcatcctcgagctctcgccgaccaaggattga

SEQ ID NO: 84 - protein, 350 aa, Oryza longistaminata
MDPWISSQPSLSLDLRVGLPATAAVAMVKPKVLVEEDFFHQQPLKKDPEVAALEAELKRMGAENRQLSEMLAAVAAKYEALQSQFSDMVTASANNGGGGGGNNPSSTSEGGSVSPSRKRKSESLDDSPPPPPPPHPHAAPHHMHVMPGAAAAGYADQTECTSGEPCKRIREECKPKISKLYVHADPSDLSLVVKDGYQWRKYGQKVTKDNPCPRAYFRCSFAPACPVKKKVQRSAEDNTILVATYEGEHNHGQPPPPLQSAAQNSDGSGKSAGKPPHAPAAAPAPAPVVPHRQHEPAVVNGEQQAAAASEMIRRNLAEQMAMTLTRDPSFKAALVTALSGRILELSPTKD

SEQ ID NO: 85 - DNA, 2646 bp, Oryza longistaminata
  CDS (1)..(2646): homologue/similar gene in O. sativa: Xa21_OsJ_05634
atggcctgggagggggttgtcggcgcggttgatgcagctagaatgtcgaagcaacaagtagtggaagcagagcacctgatgaaagctcttctggagcagaaggatggtttagcacgcagaatattttcgaaagctggaatagataacacatctgtcctgcaagctactgatgagttcatctctagacagccaaaggttgttggcgatacaagtggaccgatcatagggtcaagctttgtatcaattttggataatgcaaggaagcataagaaagaatatgctgatgagtttgtatctgttgagcacatattgcgagcattcacagaagataagaggtttggacaacagctgttcagagatctcaaaattggggagaatgagttgaaggaagctatctccgctgtacgtggcagtcagcgggtcacagatcagattgtttttctacagaggtatctctttgtctatctctctattcacaacttgagaggagactctgccgatggcaatgatccggaggggaagtaccaggctctagagaagtatggtattgacatgacagaattagctcgacgtggaaaactggatcctgttattggccgtgatgatgaagtgcgacgatgcattcagatcctttgcaggagaactaagaataatcctgtaattattggtgagccaggagttggcaaaactgctattgctgaaggattggctcaacgtattgtgcggggagatgttcctgaacctttacagaatagaaagcttatttcattggacatgggagcattacttgctggggctaaattccaaggtcaatttgaagagagacttaaggctgttctgaaggaggtcactgcctcgaatgggcaaatcatcttgttcattgatgagatccacactattgttggtgcaggagcagcaggtggggcaatggatgctggtaatttgctgaagccaatgttaggccggggtgaactccgttgcattggagcaacaacattagatgagtacaggaagtacattgagaaggatgctgctctggagcgtaggttccagcaggtttattgtggtgagccagcagttgaggatacaatctctatattgcgtggtctaagagagcggtacgaactgcatcatggtgtcaaaatatcagatggcgctcttgtttctgcagctgttttatcagatcgctacatcactggacgttttttgcctgataaagctattgacctagttgatgaagcagctgctaagctgaaaatggagataacatcgaaacctattgagttggatgagcgactgagcaagcttgaagctgatctagaatctctcaagcagaagcagaaaaacctttcagaacattgggaatatgagaagtccttgatgacccgcataagatcgatcaaggaagagactgacagagttaacctggagattgaagctgctgagagagaatatgatttgaaccgtgcagctgagctcaagtacggaacacttctgtcgctacaaaaacagcttgaagaggctgagaacaaactcatggaattccagcagtcaggcaagtcaatgcttcgagaagaggtgactgatgttgacattgctgagattgttagcaagtggactggtattccagtgtcaaaccttcaacaatctgaaaaggaaaagctactgctattggaagatgtactccacaagagggttattggccaagatattgcagtgaagtcagtggctaatgcaatccgtcgttctagggcaggcctatcagaccctaaccgtcccatagcaagcttaatgtttatgggtccaacaggtgtaggaaagaccgaactggggaaaacactagctgaattccttttcaacacagagaatgctctaatacggattgatatgagcgagtacatggaaaagcatgcagtctcccgtttggttggagcccctcctggatatattggttatggggaagggggccaactgacagaagctgttcgtcgtaggccttattctgtggttcttttcgatgaaattgagaaagcgcaccaggatgtgttcaacatcttattgcaacttttggatgacggaagaataaccgactctcagggcagaacagtcagctttactaactgtgttatcatcatgacttcaaacattgggtcgtcattgattcttgacacgcttagaaacacatcagacagcaaggaggcagtttatgaaataatgaagaagcaagtgattgacatggctcggcagtcattccggccagagtttttgaataggatagatgagtacattgtattccagccgctggacaccacagagataaatcgcatcgtggagatccagctgaaccgagtcaagaaccggctgaggcaacagaagattcatctgcagtacacaccagaagctgtggagcatcttggctctctcggctttgaccctaactacggcgctaggcctgtgaagagggtgatccagcagatggtggagaacgagatcgccctcagtgtcctgaagggcgacttcaaagaagacgacaccatcctcgtcgacgtgagttccgtggccatcgcgaaagggcttgctccacagaagaagcttgtcctccagaggttagagaatgcaaacttagagttagtcgccaatgactag

SEQ ID NO: 86 - protein, 881 aa, Oryza longistaminata
MAWEGVVGAVDAARMSKQQVVEAEHLMKALLEQKDGLARRIFSKAGIDNTSVLQATDEFISRQPKVVGDTSGPIIGSSFVSILDNARKHKKEYADEFVSVEHILRAFTEDKRFGQQLFRDLKIGENELKEAISAVRGSQRVTDQIVFLQRYLFVYLSIHNLRGDSADGNDPEGKYQALEKYGIDMTELARRGKLDPVIGRDDEVRRCIQILCRRTKNNPVIIGEPGVGKTAIAEGLAQRIVRGDVPEPLQNRKLISLDMGALLAGAKFQGQFEERLKAVLKEVTASNGQIILFIDEIHTIVGAGAAGGAMDAGNLLKPMLGRGELRCIGATTLDEYRKYIEKDAALERRFQQVYCGEPAVEDTISILRGLRERYELHHGVKISDGALVSAAVLSDRYITGRFLPDKAIDLVDEAAAKLKMEITSKPIELDERLSKLEADLESLKQKQKNLSEHWEYEKSLMTRIRSIKEETDRVNLEIEAAEREYDLNRAAELKYGTLLSLQKQLEEAENKLMEFQQSGKSMLREEVTDVDIAEIVSKWTGIPVSNLQQSEKEKLLLLEDVLHKRVIGQDIAVKSVANAIRRSRAGLSDPNRPIASLMFMGPTGVGKTELGKTLAEFLFNTENALIRIDMSEYMEKHAVSRLVGAPPGYIGYGEGGQLTEAVRRRPYSVVLFDEIEKAHQDVFNILLQLLDDGRITDSQGRTVSFTNCVIIMTSNIGSSLILDTLRNTSDSKEAVYEIMKKQVIDMARQSFRPEFLNRIDEYIVFQPLDTTEINRIVEIQLNRVKNRLRQQKIHLQYTPEAVEHLGSLGFDPNYGARPVKRVIQQMVENEIALSVLKGDFKEDDTILVDVSSVAIAKGLAPQKKLVLQRLENANLELVAND

SEQ ID NO: 87 - DNA, 897 bp, Oryza longistaminata
  CDS (1)..(897): homologue/similar gene in O. sativa: Xa21_Os02g0267000
atgtcctccatccacttcttcccggccacctcccaggccgccgccccgtcgcgccgccccctcaccaaatcctccccaaaaccccccgccgccgccaccgccgcgttccaccgcggcggaggcaacgagccggtgctcttcccgcgcctcttcctcaggaggcgtgcccggcccgccgcggcgccggccgaggcgccgccggtgggccccgacggcagcaacggcggcgggggaggaggagaggcggatggtgggggcggaggggacgacgaggaggatgaggggacgaggaaggggctgctgccggagtggctcagcgtcacgacggacgacgccaagacggtgctggccgccatcgccatctcgctcgccttccgctccttcgtcgccgagccgcgcttcatcccctcgctctccatgttccccaccttcgacgtcggcgaccgcattgtcgccgagaaggttacatactactttagaaagccatgtataaatgacatagtaatcttcaaaagtccaccagtgctgcaggaggtcggttatactgacaatgatgttttcatcaaacgaattgttgccagggagggagatgttgttgaggttcataaaggaaaactagttgtcaatggtgaagttagaaatgaagagttcattcttgagccaccttcttatgacatgaacccagtgcaagtacctgagaactcagtttttgtaatgggagataaccgaaacaacagttacgattcacatgtgtggggccctcttccttctaagaacatattggggagatccattttccggtattggcctcctggccgaatagggagcactactactgattgcctcatccctgagacaaatccaagctcgcttattgatgtcaaactggcaaagtag

SEQ ID NO: 88 - protein, 298 aa, Oryza longistaminata
MSSIHFFPATSQAAAPSRRPLTKSSPKPPAAATAAFHRGGGNEPVLFPRLFLRRRARPAAAPAEAPPVGPDGSNGGGGGGEADGGGGGDDEEDEGTRKGLLPEWLSVTTDDAKTVLAAIAISLAFRSFVAEPRFIPSLSMFPTFDVGDRIVAEKVTYYFRKPCINDIVIFKSPPVLQEVGYTDNDVFIKRIVAREGDVVEVHKGKLVVNGEVRNEEFILEPPSYDMNPVQVPENSVFVMGDNRNNSYDSHVWGPLPSKNILGRSIFRYWPPGRIGSTTTDCLIPETNPSSLIDVKLAK

SEQ ID NO: 89 - DNA, 498 bp, Oryza longistaminata
  CDS (1)..(498): homologue/similar gene in O. sativa: Xa21_Os02g0327000
atgttggggcatctggttgggctggtgaaggtgcgggtggtgaggggcgtcaacctcgccgtccgcgacctccgctccagcgacccctacgtcatcgtccgcatgggcaagcagaagttgaagacacgagtcataaaaaagactaccaatccggagtggaacgatgaactcaccctctcgattgaagatccagcagttcctgttagattggaagtgtatgacaaagacacattcatcgatgatgcaatgggcaatgcggagctggacattcgcccattggtggaggttgtcaagatgaagattgagggtgttgctgacaacacggttgtgaagaaagtggtacccaatagacagaactgcctagctgaagagagcacgatatatatctctgaggggaaggtgaagcaagacgtggttctcagactaagggatgtggaatgcggggaaattgagctccagcttcagtgggtcgacatcccaggttctaagggtgtatga

SEQ ID NO: 90 - protein, 165 aa, Oryza longistaminata
MLGHLVGLVKVRVVRGVNLAVRDLRSSDPYVIVRMGKQKLKTRVIKKTTNPEWNDELTLSIEDPAVPVRLEVYDKDTFIDDAMGNAELDIRPLVEVVKMKIEGVADNTVVKKVVPNRQNCLAEESTIYISEGKVKQDVVLRLRDVECGEIELQLQWVDIPGSKGV

SEQ ID NO: 91 - DNA, 1116 bp, Oryza longistaminata
  CDS (1)..(1116): homologue/similar gene in O. sativa: Xa21_Os02g0661100
atggatttgagcaatagctcacctgtcatcaccgatccggtggcgatcagccagccgttgttgggcggcctgccttcaaatctgatgcagttttcagtcatgcccggtggctactccagctctggcatgaacgttggtgtcagtaggctcaaaatcgaggaagtccttgtcaatggactgcttgatgccatgaaatcctcgtcacctcgcaggaggctgaatgtagcatttggcgaggacaattcatctgaagaagaagaccctgcttacagcgcttggatggcaaaatgtccttctgctttggcttccttcaagcaaattgtagccagtgcacaagggaagaagattgctgtgttcctagactacgacggcacgctgtcgcctattgtggatgatcctgacaaagcagtgatgtctcccgtgatgagagctgctgtgagaaatgttgcgaagtacttccccactgcaattgtcagcggaaggtcccgcaataaggtgtttgaatttgtaaaactgaaggagctttattatgctggaagccatggtatggacataatggcatcttcagcaaatcatgagcatagtgctgaaaagagcaaacaggccaatctcttccaacctgcacgcgagtttctgccaatgatcgatgaggttaccaagtccctcttgcaagttgtcagtggaattgaaggtgcaactgttgagaacaacaaattctgcgtttctgtacattatcgcaacgttgcagagaagcgttggaaactggtcgcacggctcgtaaacgaagtgctggaggcttttcctcgtctcaaagtaaccaatggacgaatggttttagaggttcgtccggtgatcgactgggacaagggaaaggctgtggagtttctgctccagtcactcgggctagatgactctgaaaatgtgattcccatctacattggagacgacagaactgacgaagacgctttcaaggtacttcgacagcgaaactgcggctatggaatactagtttcacaggttcccaaggaaactgaagccttctactcgctaagagacccatctgaagtgatggagttcctcaatttcttggtgagatggaagaagcactcagtgtga

SEQ ID NO: 92 - protein, 371 aa, Oryza longistaminata
MDLSNSSPVITDPVAISQPLLGGLPSNLMQFSVMPGGYSSSGMNVGVSRLKIEEVLVNGLLDAMKSSSPRRRLNVAFGEDNSSEEEDPAYSAWMAKCPSALASFKQIVASAQGKKIAVFLDYDGTLSPIVDDPDKAVMSPVMRAAVRNVAKYFPTAIVSGRSRNKVFEFVKLKELYYAGSHGMDIMASSANHEHSAEKSKQANLFQPAREFLPMIDEVTKSLLQVVSGIEGATVENNKFCVSVHYRNVAEKRWKLVARLVNEVLEAFPRLKVTNGRMVLEVRPVIDWDKGKAVEFLLQSLGLDDSENVIPIYIGDDRTDEDAFKVLRQRNCGYGILVSQVPKETEAFYSLRDPSEVMEFLNFLVRWKKHSV

SEQ ID NO: 93 - DNA, 717 bp, Oryza longistaminata
  CDS (1)..(717): homologue/similar gene in O. sativa: Xa21_Os02g0664000
atgccgtctcgcaccgccccgttcatctctcgcctccggctcctccgaaccgccgccgccctctccccgtcctcgtcctccgcgccgccgcggcacatcccccgcatcctccgcgctagccctgtcggtgcgcctcacccgccgcgcgtctccgcagccgtctcgccgctggtccgtccggtcgccgccgggttcgcgctgttcagcatggccaccgccgcctcctccgccgcatccgtccacgacttcaccgtcaaggatgcaagtggcaaagatgtggacctgagcacctacaaggggaaagtcctccttatcgtcaatgttgcatctcagtgtggcttgaccaattccaactacacggagctgagccagttgtatgagaagtacaaggaccagggttttgagatccttgctttcccatgcaaccagtttggtggacaggaacctggcactaatgaggagattgtccaatttgcttgcacccgcttcaaggccgagtatccaatttttgataaggttgatgttaatggtgacaacactgcacccatctacaagtttctgaagtccagcaaaggtggtcttttcggtgacaatatcaaatggaacttctccaagttcttggtcgacaaagaggggcgtgttgtggagcgctatgcgccaactacttctccactcagcatggagaaggacatcaagaagctgcttggaagttcttaa

SEQ ID NO: 94 - protein, 238 aa, Oryza longistaminata
MPSRTAPFISRLRLLRTAAALSPSSSSAPPRHIPRILRASPVGAPHPPRVSAAVSPLVRPVAAGFALFSMATAASSAASVHDFTVKDASGKDVDLSTYKGKVLLIVNVASQCGLTNSNYTELSQLYEKYKDQGFEILAFPCNQFGGQEPGTNEEIVQFACTRFKAEYPIFDKVDVNGDNTAPIYKFLKSSKGGLFGDNIKWNFSKFLVDKEGRVVERYAPTTSPLSMEKDIKKLLGSS

SEQ ID NO: 95 - DNA, 1488 bp, Oryza longistaminata
  CDS (1)..(1488): homologue/similar gene in O. sativa: Xa21_Os02g0671300
atgcgtttgcacgccggcgcagtgcaactccagtatttcatgccccagcagggagccgccgccgccgccgccgccgaccaccaccaggccgactcggctaccgcgtgcagcgcctccacttcgccggccgccgccgccgccaccatgtgggagtatcatcaccagctgtcgacgcacgcggccttgcagccctcgtcctcttttccctacagttactggagcccctactccgggtcgacggcgctcgccggctcggccttcgctgccgactcctcctcgtcgtcgactgacgtcatgcgtctcccggccgccggcgagcacgcccacggacacggctggagccacggcgaactaagcaacagcaccaccggcggctgctacagggagaacttcctcgatctgctcgcgtcgaagaacgtgacgccggaaatgttcgaggaagtccccgccgccgagcactacaacgtcgcgccggcggggacgaccctgacgacggcacggtcgtcgttcgatcacgctcgctccgacgtctcgccgatcaagtacgagatcgccggctcgccgttgtacttgggtggcactaacaccgtcctccaggtccaggacatgaccatgatgagtagcacgccagcatgctacggcaaacaccaccaccaccatcatcagctgacgaaggaaggcagctgcagccatcagcagcaggagcagcacgagcttgcgattagccccatggcctcatttctgcagcaaataagctccggcagtgctagtgttggcgtgcacaacagtagccttgattattcaggcttaggagatcagcctgacaagatttgctgccaggacggccgggaaatggaggctagtccttttagcatgaggagcttgccggatcttgggtcattcgccggctacacgccggccatcgagtcgacgtcggtgcaaccgtacatgagatgcgccaattcgtctgacagcaatcgacaagaacaggagactgtgccggcaaggagtagtagcagcggcagtggagcggcggcgactgatcgtaagaagaggaagttagaggaaaggcaggaaagcactgtcaagaagtccaagcaagaggcttccaaagcatcacctcctaagcaaccagtgcctaaagtaaagataggggagaagatcacagcacttcagcaaatcgtttcgccgtttgggaagacggatacagcatcggtactgtttgaaacgatcaagtatatcaagtttctgcacgaacaagtacagttgctaagtgagccgtacacgaactccagcaggagcaacaagcagggtaacagcgttccatggggagatcaagcagaagcgagcaagggagagacgacggagcatgacctgaggaacagggggctttgcttggtgcctgtctcgtggacgcccgaagtgtaccgggacggcaacgcgatggactattggacgccggcgtaccggggctgcctgtaccggtga

SEQ ID NO: 96 - protein, 495 aa, Oryza longistaminata
MRLHAGAVQLQYFMPQQGAAAAAAADHHQADSATACSASTSPAAAAATMWEYHHQLSTHAALQPSSSFPYSYWSPYSGSTALAGSAFAADSSSSSTDVMRLPAAGEHAHGHGWSHGELSNSTTGGCYRENFLDLLASKNVTPEMFEEVPAAEHYNVAPAGTTLTTARSSFDHARSDVSPIKYEIAGSPLYLGGTNTVLQVQDMTMMSSTPACYGKHHHHHHQLTKEGSCSHQQQEQHELAISPMASFLQQISSGSASVGVHNSSLDYSGLGDQPDKICCQDGREMEASPFSMRSLPDLGSFAGYTPAIESTSVQPYMRCANSSDSNRQEQETVPARSSSSGSGAAATDRKKRKLEERQESTVKKSKQEASKASPPKQPVPKVKIGEKITALQQIVSPFGKTDTASVLFETIKYIKFLHEQVQLLSEPYTNSSRSNKQGNSVPWGDQAEASKGETTEHDLRNRGLCLVPVSWTPEVYRDGNAMDYWTPAYRGCLYR

SEQ ID NO: 97 - DNA, 675 bp, Oryza longistaminata
  CDS (1)..(675): homologue/similar gene in O. sativa: Xa21_Os02g0677300
atggacgtttctgctgcgctcagcagcgactactcgtcggggacgccgtcgccggtggcggccgacgccgacgacggctcctccgcctacatgacggtgtcgtcggcgccgcccaagcggcgggcggggcggaccaagttcaaggagacgcggcaccccgtgttcaagggcgtgcgccggaggaaccccgggaggtgggtgtgcgaggtgcgcgagccgcacggcaagcagcggatatggctcgggacgttcgagacggccgagatggcggcgcgcgcgcacgacgtcgccgcgctcgcgctccgcggccgcgccgcctgcctcaacttcgccgactcgccgaggcgcctccgcgtcccgcccattggcgcaagccacgacgacatacggagggcggcggctgaggcggccgaggcattccggccgccaccagatgagagcaatgcggccaccgaggtggcagccgccgcatcgggcgccaccaattggaatgccgaacagttcgcctcccacccgtactacgaggtcatggacgatgggctggacttggggatgcagggctacctcgacatggcgcaagggatgctcattgacccgcctccaatggccggtgatcctgccgtaggtggcggggaagacgacaacgatggcgaggtccagctatggagctactga

SEQ ID NO: 98 - protein, 224 aa, Oryza longistaminata
MDVSAALSSDYSSGTPSPVAADADDGSSAYMTVSSAPPKRRAGRTKFKETRHPVFKGVRRRNPGRWVCEVREPHGKQRIWLGTFETAEMAARAHDVAALALRGRAACLNFADSPRRLRVPPIGASHDDIRRAAAEAAEAFRPPPDESNAATEVAAAASGATNWNAEQFASHPYYEVMDDGLDLGMQGYLDMAQGMLIDPPPMAGDPAVGGGEDDNDGEVQLWSY

SEQ ID NO: 99 - DNA, 645 bp, Oryza longistaminata
  CDS (1)..(645): homologue/similar gene in O. sativa: Xa21_Os02g0681200
atgggcttcccggtgggctactcggagctgctgctcccgaggctgctgctccaggtgctcctcctcctcggccacctccatcgcttcctcctctgggccttccacgcagtcggcctcggcgacctcatcgacaacccgccggggctggcggccacggagcaggacctgatgctgcaggggcgcggcggcgggatggcggagggttgggcgtcgtcgtcgtcgtcggcgctccagcaccgccggcccgagttcagggcgattccgccgatggccatcgaggaggccctccccgtggtgaggttcgacgagctggtggcgtccgcccccgccgcggtgtgcggtggcggcgactgcgcggtctgcctcagcggcatctgcggccgcgacgaggtgcggcggctgtccaactgccgccacgtcttccaccgcggctgcctcgaccgctggatggcccacgagcagcgcacctgcccgctctgccgcgcgccgctcatccccgacgagctcttgcccgccgcctccgccctgcctgacccctccgactacgacctctcgtactacccatccccgctgccactggcgcccaccccgacgctgctgcgaccacacgagctgctgctcaacggcttgggcggtttccagtga

SEQ ID NO: 100 - protein, 214 aa, Oryza longistaminata
MGFPVGYSELLLPRLLLQVLLLLGHLHRFLLWAFHAVGLGDLIDNPPGLAATEQDLMLQGRGGGMAEGWASSSSSALQHRRPEFRAIPPMAIEEALPVVRFDELVASAPAAVCGGGDCAVCLSGICGRDEVRRLSNCRHVFHRGCLDRWMAHEQRTCPLCRAPLIPDELLPAASALPDPSDYDLSYYPSPLPLAPTPTLLRPHELLLNGLGGFQ

SEQ ID NO: 101 - DNA, 495 bp, Oryza longistaminata
  CDS (1)..(495): homologue/similar gene in O. sativa: Xa21_Os02g0682300
atggggttccctctggtgtgctactgcatggcgatccccaagccgctcatcgccctggccaagctcctcgccgccatcagggaggccctccagctgatgctcttcgtcgtcgggatctgccaccacccggagcgatcgggccgcccggctgccgtcgacgccccgctgcccgacgaggtgaaggaccgcctcccgcccctcgagttcgcccagctgctcgcggcctcggagcacggctgtcacggctgcgacgacgacgaggcggtggcggggtgcatcgtgtgcctggagaggctggaggcggatgacgtggtgcggcggctgggcaactgcgcgcacgcgttccaccgcggctgcatcgaccggtggatcgacctcggccggttgacgtgcccgctgtgccgctccaacctgctgccgcgcgcgcgccccgccgacggcccgcgcgggcggctgggccgcctcgccacccgcctcacgggcgtcgtctggtga

SEQ ID NO: 102 - protein, 164 aa, Oryza longistaminata
MGFPLVCYCMAIPKPLIALAKLLAAIREALQLMLFVVGICHHPERSGRPAAVDAPLPDEVKDRLPPLEFAQLLAASEHGCHGCDDDEAVAGCIVCLERLEADDVVRRLGNCAHAFHRGCIDRWIDLGRLTCPLCRSNLLPRARPADGPRGRLGRLATRLTGVVW

SEQ ID NO: 103 - DNA, 1326 bp, Oryza longistaminata
  CDS (1)..(1326): Xa21_Os02g0703600
atgcccctgcgtgatggtgtccagcccggaggcggcgcggttcgtgctggtgacgcaggcgcacctcttcaagcccaccttcccggcgagcaaggagcggatgctgggtccccaggccatcttcttccagcagggcgactaccacgcccacctccgccgcatcgtctcccacgccttctcccccgagtccatccgcgcctccgtccccgccatcgaggccatcgcgctccgctccctccactcctgggacggccagttcgtcaacaccttccaagagatgaagacttacgcgctgaatgtggcattgctgtccatcttcggggaggaggagatgcgctacatcgaggagctgaagcagtgctacctgacgctggagaaggggtacaactcgatgccggtgaacctgccgggcaccctgttccacaaggccatgaaggcccggaagcggctgggcgccattgtggcccacatcatctcggccaggcgcgagcggcaacgcgggagcgacctgctggggtcgttcgtggacggccgcgaggccctcaccgacgcccagatcgccgacaacgtcatcggcgtcatcttcgccgcccgcgacaccaccgccagcgtcctcacctggatggtcaagttcctcggcgaccaccacgccgtcctcaaggccgtcaccgaagagcagctgcagattgccaaggagaaagaggcgtcgggcgagccgctgtcatgggcggacacgcggcggatgaagatgacgagccgggtcatccaggagacgatgagggtggcgtccatcctctccttcaccttcagggaggccgtggaggacgtggaataccaagggtacctgatccccaagggctggaaagtgctacctctgttccgcaacatccaccacaaccccgcccacttcccctgcccggaaaagttcgacccgtcccggttcgaggtcagcatcacgaacccactcttccgtgtttttgttcccttccctccctttcctttcccggtgcggccgacttcctagccaagtcggtccgcggtttgcgagcagtggccggtatgggttttcctgaccccgcgtccgtcccgtctctgttgcaggtggcgcccaagcccaacacgttcatgccgttcgggaacgggacccactcgtgcccgggcaacgagctcgccaagctggagatgctcgtgctcttccaccacctcgccaccaagtacaggtggtccacgtccaagtccgagagcggcgtccagttcggccccttcgcgctgccgctcaacggcctccccatgagcttcacccgcaagaacaccgagcaggagtga

SEQ ID NO: 104 - protein, 441 aa, Oryza longistaminata
MPLRDGVQPGGGAVRAGDAGAPLQAHLPGEQGADAGSPGHLLPAGRLPRPPPPHRLPRLLPRVHPRLRPRHRGHRAPLPPLLGRPVRQHLPRDEDLRAECGIAVHLRGGGDALHRGAEAVLPDAGEGVQLDAGEPAGHPVPQGHEGPEAAGRHCGPHHLGQARAATRERPAGVVRGRPRGPHRRPDRRQRHRRHLRRPRHHRQRPHLDGQVPRRPPRRPQGRHRRAAADCQGERGVGRAAVMGGHAADEDDEPGHPGDDEGGVHPLLHLQGGRGGRGIPRVPDPQGLESATSVPQHPPQPRPLPLPGKVRPVPVRGQHHEPTLPCFCSLPSLSFPGAADFLAKSVRGLRAVAGMGFPDPASVPSLLQVAPKPNTFMPFGNGTHSCPGNELAKLEMLVLFHHLATKYRWSTSKSESGVQFGPFALPLNGLPMSFTRKNTEQE

SEQ ID NO: 105 - DNA, 996 bp, Oryza longistaminata
  CDS (1)..(996): homologue/similar gene in O. sativa: Xa21_Os02g0704300
atgattagggaagtactctctgaggcacaggttgtgctttctactaacacaggggcagccgatccacttatcaggagaacatgttgttttgacttggtaatcatagatgaagcagggcaagcaatagaaccctcctgctggattcccatattgcagggaaagcgttgcattctcgctggtgatcattgccagcttgcaccagtaattttgtcaagaaaggccttagatggagggcttggtaaatctttgttggaaagagcttcgtcattgcacaatggattactgacaacaaggttgacagtgcagcacagaatgaatgactcaatagctagttgggcatctaaagagatgtatcatggactgctcaaatcttctcattctgttgcttcacaaactcttgctgactctccagttgtgaaggctacctggataacacggtgcccactgcttttacttgatactcgaatgccatatggggccctggacactggttgtggggaacaaatagacctttctggtacaggctcattttataatgatggagaggcagatattgtgacacaacatgttctcaaccttgtacattgtggagtatctccaacagcgatagccgttcaatcaccctacattgctcaagtgcagttgttaagagagaggctagaagaatatccagggctttctggggttgaggtttcaaccatagatagctttcaagggagggaagctgatgcagttgtcatatcgatggttcgatcaaacccactgggagcggtaggtttccttggtgacagcagacgcatgaatgtggctattacaagggcatgccggcatgtcaccgtggtatgtgacacctctactatctgtcacagcaccttcctggcaaggctccttcgtcatatcaggcgatatgggcaagtgaaacatgtagtgcctagttctttggatggggtgtctggccttggcttcagtcaacccactctgccgtccatcagttag

SEQ ID NO: 106 - protein, 331 aa, Oryza longistaminata
MIREVLSEAQVVLSTNTGAADPLIRRTCCFDLVIIDEAGQAIEPSCWIPILQGKRCILAGDHCQLAPVILSRKALDGGLGKSLLERASSLHNGLLTTRLTVQHRMNDSIASWASKEMYHGLLKSSHSVASQTLADSPVVKATWITRCPLLLLDTRMPYGALDTGCGEQIDLSGTGSFYNDGEADIVTQHVLNLVHCGVSPTAIAVQSPYIAQVQLLRERLEEYPGLSGVEVSTIDSFQGREADAVVISMVRSNPLGAVGFLGDSRRMNVAITRACRHVTVVCDTSTICHSTFLARLLRHIRRYGQVKHVVPSSLDGVSGLGFSQPTLPSIS

SEQ ID NO: 107 - DNA, 1146 bp, Oryza longistaminata
  CDS (1)..(1146): homologue/similar gene in O. sativa: Xa21_Os02g0730800
atggacgccgcccgcgcctccctcctcttggccggcggcctcgccgtatccacctccacctccgccgtcgccactgccgcccaaaccgtctcgattcctcacctatcgccgcacacccgccaacggcgacagcgccgcttcctccgcctggcctccgctgcggcgtcgtctcccccgccgctccccgctgcttccgcgcagccgcattgctctaggtgggtcgtggtgatggagagaccccccgcgccagcgggaggcggcgaggtgtcccgtgcggaggccgtcgaccactacgtcgccacactggccagggtattggggagccaggaggaagcacagatgcgcatatacgatgcttcgtgggatgggagctacgagttcagctgcgagatcgacgatgaagcgtcaagggaccttgcgaaaatgcccggggtattagctgttaagccagatatggataaggttgatatgtcagagaaggatagtcatggctcaggcctctcagcagctaacctaggaaatttcagtgatgctgtttccaatcacccttcttctagtggggaaaatgagttttggcttgtgcgaatggagaagcctggggttgaagttgtgacaaaggcacaaatggtggatcattatacccaaatcctcatgaaagtgttggggaatgaaaaggatgcacaagtcagcatatatcacatttcatgggagagggattatggcttctgctgtcacattgacgaagaatgtgcaaaggagctagctgatgtttctggagtgttatctgttcaaccggacccaaattttggatccgacaacaaaaattacaaaggtgatgacagcttcaaatcgtcggaagctactcaggctaaagtcaaaactaaaaggctctttgttacaggtctttcattttatacatctgagaaaactttgcgggctgcctttgagccttttggtgaactagttgaagtgaagataataatggacaagatatcaaaaagatcaaaagggtatgctttcatagaatataccacagaagaagctggaggtgctgctctgaaagcaatgaacggacagataataaatggctggatgatagttgtcgatgttgctaaacatagatcgaggaaccgtcaacccccgtag

SEQ ID NO: 108 - protein, 381 aa, Oryza longistaminata
MDAARASLLLAGGLAVSTSTSAVATAAQTVSIPHLSPHTRQRRQRRFLRLASAAASSPPPLPAASAQPHCSRWVVVMERPPAPAGGGEVSRAEAVDHYVATLARVLGSQEEAQMRIYDASWDGSYEFSCEIDDEASRDLAKMPGVLAVKPDMDKVDMSEKDSHGSGLSAANLGNFSDAVSNHPSSSGENEFWLVRMEKPGVEVVTKAQMVDHYTQILMKVLGNEKDAQVSIYHISWERDYGFCCHIDEECAKELADVSGVLSVQPDPNFGSDNKNYKGDDSFKSSEATQAKVKTKRLFVTGLSFYTSEKTLRAAFEPFGELVEVKIIMDKISKRSKGYAFIEYTTEEAGGAALKAMNGQIINGWMIVVDVAKHRSRNRQPP

SEQ ID NO: 109 - DNA, 1311 bp, Oryza longistaminata
  CDS (1)..(1311): homologue/similar gene in O. sativa: Xa21_Os02g0759400
atgccaagttgccgagctaggatgcacgcgcaccagcacgcgctgctcgcggcgctcctcgcgtgcgcgctcgcggcgtcgtcgtcgacggccggagcgcagccggcggggcagcaggggtatgtctacggcgacgtgtccgggcagcaggtgcacgtcagcacgacgatgatcgtgctgctggccgccgtcgtcggggttttcctgttcatcgcgatctccaccatctacctccgccactgcaccggttacgaccccgcgacggagggcggcgtcggcgggcgccgctccatgatcctacctgccaacagcttcgtctcgaggcggcagcggcggccgcgcgggctcgactcgtcggtggtccggatgttccccaccatgaagtacgccgaggcgaaggcgctgcgggtggggaaggtcgccggcgcggcgctggagtgcgcggtgtgcctcagtgagttcgaggacgacgagatgctcaggttcttgcccaagtgcagccacgccttccacccggactgcatcggccagtggctcgccagccacgtgacatgccccgtctgccgccggaatcttgaccctaacaaggacaccaccgaggaggtgatcatcccggccgccgccgccgccgccgatcatccgaacagcacctccagtgaaatagtcgtgatacggcaagaagacggggcgcacccagcagccgtggtgatcgacgtggtcaccgaggaggacgacgaggagcggaggaaggaggagctagagcttcaggcgataggcacccagctccgcgcgatgcggtcacggccggggctgcggccaaagacgtcggcggcgaagcttccccggtcgcactccactggccactccctcgccgtccggctcgacggcgacctggagcggtacacgctgcggctgccggagcacgtacacagggagatggtctcggcgggggagcagagcgtgcgccgcgggaggagactcggggaaggggtcggcatgggcgctcggtgcagcccccggttttcgcggtcgggcagatggtcatcttttctctcaaattctttgtcaggaaagctgtctttcctctccccgtcgtcgaggagaacgccggatagcacccaggtggaagtgtcatcatcctcgtcgtcgtcggcgacgaaggtgagagggaagcgcgtggccgccgtcgatgttgccgacgacggttctgctcatgggactgcacagtaccctggttgcactgtggccagctcggcggcggcggcggctgtggacgtggagaaggcagctaccaggcaagttcgaacatag

SEQ ID NO: 110 - protein, 436 aa, Oryza longistaminata
MPSCRARMHAHQHALLAALLACALAASSSTAGAQPAGQQGYVYGDVSGQQVHVSTTMIVLLAAVVGVFLFIAISTIYLRHCTGYDPATEGGVGGRRSMILPANSFVSRRQRRPRGLDSSVVRMFPTMKYAEAKALRVGKVAGAALECAVCLSEFEDDEMLRFLPKCSHAFHPDCIGQWLASHVTCPVCRRNLDPNKDTTEEVIIPAAAAAADHPNSTSSEIVVIRQEDGAHPAAVVIDVVTEEDDEERRKEELELQAIGTQLRAMRSRPGLRPKTSAAKLPRSHSTGHSLAVRLDGDLERYTLRLPEHVHREMVSAGEQSVRRGRRLGEGVGMGARCSPRFSRSGRWSSFLSNSLSGKLSFLSPSSRRTPDSTQVEVSSSSSSSATKVRGKRVAAVDVADDGSAHGTAQYPGCTVASSAAAAAVDVEKAATRQVRT

SEQ ID NO: 111 - DNA, 1362 bp, Oryza longistaminata
  CDS (1)..(1362): homologue/similar gene in O. sativa: Xa21_OsJ_08589
atgaggaggatgttgcgttgcttcttcggcggcggcggcggtggcgacgagacgggaggtgacgaggagaagaaggcgtcggcggcggcggtggtgaagaacaagaaggcggtgaggcggatgcggagcgcgacggggcggctccggtcgctgtcgctggaggacctgtcgcggacgctggcgcagtccgggctgcaggccttcacgctggcggagctcaaggccgccacgcgcagcttctccggcagcaacttcatcggcgagggcggattcggccccgtctacaagggcttcatcgacgccaagctccgccccggcatcctccagccccagcacgtcgccgtcaagtacctcgacggcgaaggcgaccagggccaccgcgaatggctggcggaggtggtgtacctggggatgttgagccatccgcatctggtgaagctgatcggctactgctgccaagacgaccaccggatgctcgtctacgagtacatggccaggggcagcctcgagcaccacctcttcaagaatttgctgtcgagcttgccatgggcgacgcggctgaagatcgcggtgggcgcggccaaggggctcgcgttcctgcacgacgccgacactccggtgatctaccgagacttcaaggcatccaacatcctgctcgactcggattacacggcgaagctctcggacttcgggctggccaaggagggcccgcagggggacgcgacccacgtgacgacgcgcgtgatggggacccacgggtacgcggcgccggagtacatcctgacggggcacctgacggcgaagagcgacgtgtacagcttcggggtggtgctgctggagctgctgacggggcggcggagcgtggacaagcggcggcgcgggcgggagcagaacctcgtggactgggcgcggccgtacctccggcggccggagcggctgcaccgggtgatggaccccagcctggagggcggctactccgacagggcggcggccaaggccgccatggtggcgtaccactgcctccacagcgtgcccaagtcccgcccccacatgcgcgacgtcgtcgccgcgctcgagccgctgctgcagacgtcgtgcggcgacgtgctcgccgggcccttcgtctacaccgtcccgtccgcgccggcgcccgccgctgttgttgtcgccaaggacgacgagaagaaggcggccgcggccgcgggtgaggacggcgaggaggaggtggcggcggtggccaaggcgaagaggaggtacgtggcgtcggcggtgcacgcggagggcgcgatgcggaagggggagcaccggtacgcgagctccgtgtccggctcgccgaggcagagcagggacaggggcgcgtag

SEQ ID NO: 112 - protein, 453 aa, Oryza longistaminata
MRRMLRCFFGGGGGGDETGGDEEKKASAAAVVKNKKAVRRMRSATGRLRSLSLEDLSRTLAQSGLQAFTLAELKAATRSFSGSNFIGEGGFGPVYKGFIDAKLRPGILQPQHVAVKYLDGEGDQGHREWLAEVVYLGMLSHPHLVKLIGYCCQDDHRMLVYEYMARGSLEHHLFKNLLSSLPWATRLKIAVGAAKGLAFLHDADTPVIYRDFKASNILLDSDYTAKLSDFGLAKEGPQGDATHVTTRVMGTHGYAAPEYILTGHLTAKSDVYSFGVVLLELLTGRRSVDKRRRGREQNLVDWARPYLRRPERLHRVMDPSLEGGYSDRAAAKAAMVAYHCLHSVPKSRPHMRDVVAALEPLLQTSCGDVLAGPFVYTVPSAPAPAAVVVAKDDEKKAAAAAGEDGEEEVAAVAKAKRRYVASAVHAEGAMRKGEHRYASSVSGSPRQSRDRGA

SEQ ID NO: 113 - DNA, 1467 bp, Oryza longistaminata
  CDS (1)..(1467): homologue/similar gene in O. sativa:Xa21_Os02g0787800
atggagcgagcggaggagacgccgagggcgccgtcgacggcgccgtcggcgagggtgtcgatctgggagtcggtgcgcgcgtgcggggtgtgggggaaggaggtggacaaggccgagctgcggaggcaggtcgtcatgccgctgtacgcgcggcgtgcggtcgcggccgccgtgaaggccaaggacgaggccgtcggcgtggcggcggcggcggagaggggcgaggaggtggagggggaggtggaggtggaggcggccgtgacgccggtggtggtgttcgtcaactcgcggagcggtggtaggcacgggcccgagctcaaggtgcggctccacgagctcatcagcgaggagcaggtctttgatctctctgtcgtgaagccttctgatttcattaactacgggttgggttgtttggagaaattggccgaacaaggtgacaattgtgcggagaccattcgaaaaaaattgaggattatggttgctggtggtgatggcacagttggttgggtacttggctgtctcacagatctttataggttgaaaagagaaccagttccacccacaggtatcatcccacttggtacaggaaatgatcttgccagatcatttggatggggtggctcttttcccttcggttggcgttcagctgtgaagcgttatctcagcaaggcagctacagctcccacatgccgtcttgatagttggcaagctgtagttatgatgccagatggagagataaaagagttgccatatgcacttaagaaaacggaacctgcagactgcttggaactttgccaggagaatggcactgagttacctgagaaagcttcttgctataaaggagtattctacaactaccttagcattgggatggatgcccaagttgcttatggcttccaccatcttcgtgatgaaaagccatatcttgctcaagggccagttgcaaataagttgatatatgctggttatagctgcacacaggggtggttctgcacaccttgtacagcaagccctcagttaagggggcttaagaacattttgcgactttacattaaaaaagtcaattgttctgaatgggagcaagttacaatgccttcaagtgttagatccctggtggtcttaaatttatacaactacggcagtggaaggcatccatggggtgatcttaaacctgattaccttgaaaagaaaggttttgttgaagctcattccgatgatggattgcttgaaatattcggtctgaaagaaggttggcatgcttcattcgttatggctgagctaattaaagcaaagcacattgctcaggctgcagccatcaagtttgaaatgaggggtggccaatggaatcgtgcgtatgttcagatggatggagagccatggaaacaaccactcctacaggagcagtcaaccattatcgagattaacaaagttccttacccttctctgatgataaatggggagcaatga

SEQ ID NO: 114 - protein, 488 aa, Oryza longistaminata
MERAEETPRAPSTAPSARVSIWESVRACGVWGKEVDKAELRRQVVMPLYARRAVAAAVKAKDEAVGVAAAAERGEEVEGEVEVEAAVTPVVVFVNSRSGGRHGPELKVRLHELISEEQVFDLSVVKPSDFINYGLGCLEKLAEQGDNCAETIRKKLRIMVAGGDGTVGWVLGCLTDLYRLKREPVPPTGIIPLGTGNDLARSFGWGGSFPFGWRSAVKRYLSKAATAPTCRLDSWQAVVMMPDGEIKELPYALKKTEPADCLELCQENGTELPEKASCYKGVFYNYLSIGMDAQVAYGFHHLRDEKPYLAQGPVANKLIYAGYSCTQGWFCTPCTASPQLRGLKNILRLYIKKVNCSEWEQVTMPSSVRSLVVLNLYNYGSGRHPWGDLKPDYLEKKGFVEAHSDDGLLEIFGLKEGWHASFVMAELIKAKHIAQAAAIKFEMRGGQWNRAYVQMDGEPWKQPLLQEQSTIIEINKVPYPSLMINGEQ

SEQ ID NO: 115 - DNA, 1359 bp, Oryza longistaminata
  CDS (1)..(1359): homologue/similar gene in O. sativa: Xa21_OsJ_09250(former:Os03g0126800)
atggcggaggcggcgggggtgggggcgggggccgggccggcgaggaggacgacgagggtggggcgctacgagctcggcaagacgatcggggaggggagcttcgccaaggtcaaggtcgcccgcgacacgcgcaccggcgacaccctcgccatcaaggtgctcgaccgcaaccatgtgcttcgccacaagatggtcgagcagatcaaacgggagatttccacaatgaagctaataaaacatccaaatgtggtccagttgcatgaggtcatggctagcaaatcaaagatatacatggttcttgaatatgttgatggaggcgagctttttgataagattgtcaattctgggaggctaggagaagatgaagcaagaagatacttccatcaacttataaatgcagtagattattgccacagcagaggagtgtaccatagagatctgaagccagagaatctgcttcttgattcacatggagctcttaaagtttcagatttcggccttagtgcgtttgctccacaaacaaaagaggatggacttctgcatactgcttgcggaacaccaaattatgttgcacctgaggtgcttgctgataaaggttatgatggtatggctgctgatgtatggtcctgcggcataatcttatttgtcctcatggctggatatttacctttcgatgaccccaacctaatgaccctttacaaactgatctgcaaggcaaaagtttcttgtccacactggttttcttcaggtgcgaagaaattcattaagcgcatacttgatcctaatccctgcacaagaataacaattgcacaaattttggaagatgattggttcaaaaaggattacaaaccaccactttttgagcaaggtgaagatgtgagccttgatgatgttgatgctgcattcgattgttcagaggagaatctcgtggcagagaagagagaaaagcctgaatccatgaatgcatttgctctaatttcaaggtcacagggattcaaccttggaaatttatttgagaaggaaatgatgggaatggtgaagcgggaaacttccttcacatctcaatgtacaccacaggagatcatgtctaaaatagaggaagcttgtggacctcttggtttcaatgtgcggaaacaaaattataagatgaagttaaaaggtgataagactggaagaaaaggccatttatctgtagcaacggaggttttcgaggttgctccatcactccacatggttgagcttcgtaaaactggaggggacacgctggagtttcacaatttctacaacaatttctcgtcagagttaaaagacatagtgtggaaatctgaatctgacgcaaaagcagcaaagaagaggtga

SEQ ID NO: 116 - protein, 452 aa, Oryza longistaminata
MAEAAGVGAGAGPARRTTRVGRYELGKTIGEGSFAKVKVARDTRTGDTLAIKVLDRNHVLRHKMVEQIKREISTMKLIKHPNVVQLHEVMASKSKIYMVLEYVDGGELFDKIVNSGRLGEDEARRYFHQLINAVDYCHSRGVYHRDLKPENLLLDSHGALKVSDFGLSAFAPQTKEDGLLHTACGTPNYVAPEVLADKGYDGMAADVWSCGIILFVLMAGYLPFDDPNLMTLYKLICKAKVSCPHWFSSGAKKFIKRILDPNPCTRITIAQILEDDWFKKDYKPPLFEQGEDVSLDDVDAAFDCSEENLVAEKREKPESMNAFALISRSQGFNLGNLFEKEMMGMVKRETSFTSQCTPQEIMSKIEEACGPLGFNVRKQNYKMKLKGDKTGRKGHLSVATEVFEVAPSLHMVELRKTGGDTLEFHNFYNNFSSELKDIVWKSESDAKAAKKR

SEQ ID NO: 117 - DNA, 636 bp, Oryza longistaminata
  CDS (1)..(636): homologue/similar gene in O. sativa: Xa21_Os03g0180900
atggccggtagtagtagcgagcagcagctggtcgccaacgcggcggctacgacggtggccgggaacgggagcaggttcgcggtgacgtgtggcttgctcaggcagtacatgaaggagcacagtggaagcaacggcggcggtggcttcttgccggcggtgacggccatgagcctcatgaccggcggcgctgatgcggaggaggcggcgccggaggtgaggaagaccatggagctcttccctcagcaggctgggacgctgaaagactcgcaagaaaggaaggagatcactgagaaggcggcgcagctgaccatcttctacggcgggagcgtggtggtgttcgacgacttccccgccgagatggccggcgagctgatgaagctcgccggctcccgcgacagcacggcggcggcggccgtctccgacgccggcgccgcagcggggcagccttgcctaccagacatgcccatcgcgaggaaggtgtcgctgcagaggttcctggagaagaggaagaacaggatcgtcgcggcggagccactgccggagtcggagaagaaggaggcggagccgagcaagcgtgccaagaaagacgacggcggcgcgtcgtggctccaggtgaaccccactctcagcctgtga

SEQ ID NO: 118 - protein, 211 aa, Oryza longistaminata
MAGSSSEQQLVANAAATTVAGNGSRFAVTCGLLRQYMKEHSGSNGGGGFLPAVTAMSLMTGGADAEEAAPEVRKTMELFPQQAGTLKDSQERKEITEKAAQLTIFYGGSVVVFDDFPAEMAGELMKLAGSRDSTAAAAVSDAGAAAGQPCLPDMPIARKVSLQRFLEKRKNRIVAAEPLPESEKKEAEPSKRAKKDDGGASWLQVNPTLSL

SEQ ID NO: 119 - DNA, 1374 bp, Oryza longistaminata
  CDS (1)..(1374): homologue/similar gene in O. sativa: Xa21_OsJ_09990(former:Os03g0225900)
atggagctaggcgtgccactgccacgacggcccgtgcccggtagctacggcgtgccgttcgtctcggcggtgcgcgaccgcctcgacttctactacttgcaggggcaggacaagtacttcgagtcgcgcgccgagaggtacggctccaccgtcgtccgcatcaacgtcccgcctggccccttcatggcgcgcgacccccgcgtggtggcgctcctcgacgccaagagcttccccgtcctcttcgacgtcgccaaggtcgagaagcgggacgtgttcaccggcacgttcatgccgtccacctccctcacaggcggctaccgcgtctgcgcctacctcgacccgtccgagcccaaccacgccaagatcaagcagctgctcctctccctcctggtctctcgcaaggacgccttcgtcccggtcttccgctccaacttcggcgcgctcctcgacaccgtcgagttgcagctcgccagcggcggcggcaagtcggacttcaccgccctcaacgatgccacctccttcgagttcatcggcgaggcgtacttcggcgtgcgtccctccgcgtcgagctccctcggcaccggcgggccgaccaaggccgccctgtggctcctatggcagctcgccccgctcaccacgctcggcctgcccatgatcatcgaggatccgctcctccacacgctgccgctgccacccttcctcatcagctccgactacaaggcgctgtacgcgtacttcgccgccgcggcgtcgcaggcgctcgacgccgccgagggccttggcctgtcgcgggaggaggcctgccacaacctgctgttcgcgacggccggcgagaagctccacgagaggctcgccgcggagatacgaagcgcggtggccgacgccggcggcaacgtgacgctggccgctctggagaagatggagctgaccaggtcggtggtgtgggaggcgctgcggctggacccgccggtcaggttccagtacgggcgcgccaaggccgacctggagatcgagagccacgacgcgtcgttcgcgatcaagaagggggagatgctgttcggctaccagccgtgcgccaccagggacccgcgggtgttcggcgccacggcgagggagttcgttggcgaccggttcgtcggcgaggaggggaggaagctgctgcagtacgtgtactggtcgaatgggcgagagacggagaaccctagcgttgacaacaagcagtgccccggcaagaatcttgtggtgctcgtcggtaggctgctgctcgtcgagctcttcctccggtacgacaccttcaccgccgaggccggcaaaaaggtggtcatcaccggggtcaccaaagcttcaacctccgtcgtcaatcgtactgcttaa

SEQ ID NO: 120 - protein, 457 aa, Oryza longistaminata
MELGVPLPRRPVPGSYGVPFVSAVRDRLDFYYLQGQDKYFESRAERYGSTVVRINVPPGPFMARDPRVVALLDAKSFPVLFDVAKVEKRDVFTGTFMPSTSLTGGYRVCAYLDPSEPNHAKIKQLLLSLLVSRKDAFVPVFRSNFGALLDTVELQLASGGGKSDFTALNDATSFEFIGEAYFGVRPSASSSLGTGGPTKAALWLLWQLAPLTTLGLPMIIEDPLLHTLPLPPFLISSDYKALYAYFAAAASQALDAAEGLGLSREEACHNLLFATAGEKLHERLAAEIRSAVADAGGNVTLAALEKMELTRSVVWEALRLDPPVRFQYGRAKADLEIESHDASFAIKKGEMLFGYQPCATRDPRVFGATAREFVGDRFVGEEGRKLLQYVYWSNGRETENPSVDNKQCPGKNLVVLVGRLLLVELFLRYDTFTAEAGKKVVITGVTKASTSVVNRTA

SEQ ID NO: 121 - DNA, 1344 bp, Oryza longistaminata
  CDS (1)..(1344): homologue/similar gene in O. sativa: Xa21_Os03g0241400
atgtcgaggtgcttcccctacccgccgccggggtacgtgcgaaacccagtggtggccgtggccgcggccgaagcgcaggcgaccactaagctccagaaagaaagggaaaaggccgaaaagaagaaagagaaaaagagtgacaggaaagctcttccacatggtgagatatccaaacattcaaagcgaacccacaagaagagaaaacatgaagacatcaataatgctgatcagaagtcccggaaggtttcctccatggaacctggtgagcaattggagaagagtggactctcagaagagcatggagctccttgctttactcagacagtgcatggctctccagagagttcacaggacagcagcaagagaagaaaggttgtggtacccagtcctagccaagctaagaatggtaacatccttcgaataaagataagaagagatcaagattcttcagcttccatttctgagaaatctaatgttgtacaaacaccagttcatcaaatgggttcagtttcatctctgcccagtaagaaaaactcaatgcaaccacacaacactgaaatgatggtgaggacagcatcaacccagcagcaaagcatcaaaggtgattttcaagcagtaccgaaacaaggtatgccaaccccagcaaaagtcatgccaagagtcgatgttcctcctccatctatgagggcatcaaaggaaagggttggccttcgtcctgcagagatgttggccaatgttggtccttcaccctccaaggcaaaacaaattgtccatcccgcacctgctaaggttacacaaagggttgatcctccacctgctaaggcatctcagagaattgatcctcagttgccatccaaggttcatatagatgctactcgatcttttacgaaggtctcccagacagagatcaagccggaagtacagcccccaattccgaaggtgcctgtggctatgcctaccatcaatcgtcagcagattgacaccttgcagcccaaagaagagccttgctcctctggcaggaatgctgaagctgcttcagtatcagtagagaagcagtccaagtcagatcgcaaaaagagtcgcaaagctgagaagaaagagaagaagttcaaagatttatttgttacctgggatcctccgtctatggaaatggatgatatggatcttggcaaccaggattggctgcttggtagtacgaggaaacctgatgctggcattggcaactgcagagaaattgttgatccacttacttctcaatcagcagagcagttctcattgcagcccagggcgattcatttaccagaccttcatgtctatcagttgccatatgtggttccattctag

SEQ ID NO: 122 - protein, 447 aa, Oryza longistaminata
MSRCFPYPPPGYVRNPVVAVAAAEAQATTKLQKEREKAEKKKEKKSDRKALPHGEISKHSKRTHKKRKHEDINNADQKSRKVSSMEPGEQLEKSGLSEEHGAPCFTQTVHGSPESSQDSSKRRKVVVPSPSQAKNGNILRIKIRRDQDSSASISEKSNVVQTPVHQMGSVSSLPSKKNSMQPHNTEMMVRTASTQQQSIKGDFQAVPKQGMPTPAKVMPRVDVPPPSMRASKERVGLRPAEMLANVGPSPSKAKQIVHPAPAKVTQRVDPPPAKASQRIDPQLPSKVHIDATRSFTKVSQTEIKPEVQPPIPKVPVAMPTINRQQIDTLQPKEEPCSSGRNAEAASVSVEKQSKSDRKKSRKAEKKEKKFKDLFVTWDPPSMEMDDMDLGNQDWLLGSTRKPDAGIGNCREIVDPLTSQSAEQFSLQPRAIHLPDLHVYQLPYVVPF

SEQ ID NO: 123 - DNA, 378 bp, Oryza longistaminata
  CDS (1)..(378): homologue/similar gene in O. sativa: Xa21_Os03g0265600
atgtcgtactccagaggatcaagatatgagtcccactcatattctacatcgcccagacggagcagccgttcaaggtataggagtcgttctaggagtgtggactcaagtgatgttgaaaaccctgggaacaacctgtatgttactggcttatctgctcgtgtgacggatcgagatctggagaaacacttttctgctgagggagaggttattgatgctagcatagtacttgatccatggacaagggaatcccggggatttggatttgttaccatggctactgttaaggaggctgatctttgcatcaaatatctagaccgctcagtgttggaaggtcgtgtgataactgtagagaagcttttgttgacagcagcagggtag

SEQ ID NO: 124 - protein, 125 aa, Oryza longistaminata
MSYSRGSRYESHSYSTSPRRSSRSRYRSRSRSVDSSDVENPGNNLYVTGLSARVTDRDLEKHFSAEGEVIDASIVLDPWTRESRGFGFVTMATVKEADLCIKYLDRSVLEGRVITVEKLLLTAAG

SEQ ID NO: 125 - DNA, 1959 bp, Oryza longistaminata
  CDS (1)..(1959): homologue/similar gene in O. sativa: Xa21_OsJ_10337(Os03g0277300)
atggccggcaagggagacgggccggcgatcggcatcgacctcgggacgacctactcgtgcgtcggcgtgtggcagcacgaccgcgtcgagatcatcgccaacgaccaggggaaccgcaccacgccgtcgtatgtcgcgttcacggactcggagaggctcatcggcgacgccgccaagaaccaggtggccatgaaccccatcaacaccgtcttcgatgcgaagcgtctcatcggccggcgtttctctgacacgtcggtgcagagcgacgcgaagctgtggccgttcaaggtgctccccggccccggcgacaagccgatgatcggcgtgcagtacaagggcgaggagaagcagttctccgccgaggagatctcgtccatggtgctcaacaagatgaaggagacggccgaggcctacctcggcagcaccgtcaagaacgccgtcgtcaccgtccccgcctacttcaacgactcccagcgccaggccaccaaggacgccggcgtcatctccggcctcaacgtcatgcgcatcatcaacgagcccaccgccgccgccatcgcctacggcctcgacaagaaggccgccagcaccggcgagaagaacgtgctcatcttcgacctcggcggcggcaccttcgacgtctccatcctcaccatcgaggagggcatcttcgaggtcaaggccaccgccggcgacacccacctgggaggcgaggacttcgacaaccggatggtgaaccacttcgtgcaggagttcaagaggaagcacaagaaggacatcaccggcaacccgagggcgctccggcggctgaggacggcgtgcgagagggcgaagaggacgctgtcctccaccgcacagaccaccatcgagatcgactcgctctacgagggcatcgacttctacgccaccatcacccgcgcccggttcgaggagctcaacatggacctcttccgccggtgcatggagcccgtggagaagtgcctccgcgacgccaagatggacaaggcccagatccacgacgtcgtcctcgtcggaggctccacccgtatccccaaggtgcagcagctcctgcaggacttcttcaacgggaaggagctctgcaagagcatcaaccccgacgaggccgtggcgtacggcgccgccgtccaggccgccatcctcagcggcgagggcaaccagagggtgcaggacctgctcctcctcgacgtcacgccgctctcgctcgggttggagacggccggaggcgtgatgaccgtgctgatcccgaggaacaccaccatccccaccaagaaggagcaggtcttctccacctactccgacaatcagcccggcgtgctcatccaggtgtacgagggcgagaggacgaggaccaaggacaacaacctgctcggcaagttcgagctcaccggcatccctccggcgccgaggggcgtgccccagatcaacgtgacgttcgacatcgacgcgaacggcatcctgaacgtgtcggcggaggacaagacgacggggaagaagaacaagatcaccatcaccaacgacaaggggcggctgagcaaggaggagatcgagcggatggtgcaggaggccgagaagtacaaggccgaggacgagcaggtgcggcacaaggtggaggcccgcaacgcgctggagaactacgcgtacaacatgcgcaacacggtgcgcgacgacaagatcgcctccaagctccccgccgacgacaagaagaagatcgaggacgccatcgaggatgccatcaagtggctcgacggcaaccagctcgccgaggccgacgagttcgaggacaagatgaaggagctcgagagcctctgcaacccgatcatctcaaagatgtaccagggcggcgccggtggtccggcgggcatggacgaagacgcccccaacggcggcgccggcaccggcggtggcagcggcgctggccccaagatcgaggaagtggactaa

SEQ ID NO: 126 - protein, 652 aa, Oryza longistaminata
MAGKGDGPAIGIDLGTTYSCVGVWQHDRVEIIANDQGNRTTPSYVAFTDSERLIGDAAKNQVAMNPINTVFDAKRLIGRRFSDTSVQSDAKLWPFKVLPGPGDKPMIGVQYKGEEKQFSAEEISSMVLNKMKETAEAYLGSTVKNAVVTVPAYFNDSQRQATKDAGVISGLNVMRIINEPTAAAIAYGLDKKAASTGEKNVLIFDLGGGTFDVSILTIEEGIFEVKATAGDTHLGGEDFDNRMVNHFVQEFKRKHKKDITGNPRALRRLRTACERAKRTLSSTAQTTIEIDSLYEGIDFYATITRARFEELNMDLFRRCMEPVEKCLRDAKMDKAQIHDVVLVGGSTRIPKVQQLLQDFFNGKELCKSINPDEAVAYGAAVQAAILSGEGNQRVQDLLLLDVTPLSLGLETAGGVMTVLIPRNTTIPTKKEQVFSTYSDNQPGVLIQVYEGERTRTKDNNLLGKFELTGIPPAPRGVPQINVTFDIDANGILNVSAEDKTTGKKNKITITNDKGRLSKEEIERMVQEAEKYKAEDEQVRHKVEARNALENYAYNMRNTVRDDKIASKLPADDKKKIEDAIEDAIKWLDGNQLAEADEFEDKMKELESLCNPIISKMYQGGAGGPAGMDEDAPNGGAGTGGGSGAGPKIEEVD

SEQ ID NO: 127 - DNA, 1110 bp, Oryza longistaminata
  CDS (1)..(1110): homologue/similar gene in O. sativa: Xa21_OsJ_10412(Os03g0285800)
atggacggggcgccggtggcggagttcaggccgacgatgacgcacggcggccggtacctgctctacgacatcttcgggaacaagttcgaggtgacgaacaagtaccagccgcccatcatgcccatcggccgcggcgcctacgggatcgtctgctcggtgatgaactttgagacgagggagatggtggcgataaagaagatcgccaacgcgttcaacaacgacatggacgccaagcggacgctccgggagatcaagctcctcaggcacctcgaccacgagaacatcataggcatcagggacgtgatcccgccgccgatccctcaggcgttcaacgacgtctacatcgccacggagctcatggacaccgacctccatcacatcatccgctccaaccaagaactgtcagaagagcactgccagtatttcctgtatcagatcctgcgggggctcaagtacatccactcggcgaacgtgatccaccgcgacctgaagccgagcaacctgctgctgaacgccaactgcgacctcaagatctgcgacttcgggctggcgcggccgtcgtcggagagcgacatgatgacggagtacgtggtcacccggtggtaccgcgcgccggagctgctgctcaactccaccgactactccgccgccatcgacgtctggtccgtcggctgcatcttcatggagctcatcaaccgccagccgctcttccccggccgggaccacatgcaccagatgcgcctcatcaccgaggtgatcgggacgccgacggacgacgagctggggttcatacggaacgaggacgcgaggaagtacatgaggcacctgccgcagtacccgcgccggacgttcgcgagcatgttcccgcgggtgcagcccgccgcgctcgacctcatcgagaggatgctcaccttcaacccgctgcagaggatcacagttgaggaggcgctcgatcatccttacctagagagattgcacgacatcgccgatgagcccatctgcctggagcccttctccttcgacttcgagcagaaggctctaaacgaggaccagatgaagcagctgatcttcaacgaagcgatcgagatgaacccaaacttccggtactag

SEQ ID NO: 128 - protein, 369 aa, Oryza longistaminata
MDGAPVAEFRPTMTHGGRYLLYDIFGNKFEVTNKYQPPIMPIGRGAYGIVCSVMNFETREMVAIKKIANAFNNDMDAKRTLREIKLLRHLDHENIIGIRDVIPPPIPQAFNDVYIATELMDTDLHHIIRSNQELSEEHCQYFLYQILRGLKYIHSANVIHRDLKPSNLLLNANCDLKICDFGLARPSSESDMMTEYVVTRWYRAPELLLNSTDYSAAIDVWSVGCIFMELINRQPLFPGRDHMHQMRLITEVIGTPTDDELGFIRNEDARKYMRHLPQYPRRTFASMFPRVQPAALDLIERMLTFNPLQRITVEEALDHPYLERLHDIADEPICLEPFSFDFEQKALNEDQMKQLIFNEAIEMNPNFRY

SEQ ID NO: 129 - DNA, 1362 bp, Oryza longistaminata
  CDS (1)..(1362): homologue/similar gene in O. sativa: Xa21_OsJ_10445(Os03g0290300)
atggcacggctcgtgctctccgagtgctgcggcctcacgccgctccgcctgcgcgggcgcggcgccattgcgctgccggcgcctcccagcctcacggcggggccgcgccgccccgtgcccgccgccgccgcggggggagccatccaccgcgagtgggcgctccgcgtctccgccccgacccgcctcacctccgtcgtcgaggaggataatagaggggaggaggtggtggaggaggaggccaggggttcgttggcggccgccgccgtaggaggggacggagacgggttcgaccccggggcgccgccgccgttcgggctcgcggagatccgcgcggccatccccaagcactgctgggtgaaggacccctggaggtccatgagctacgtgctgcgcgacgtcgtcgtcgtgctcggcctcgccgccgccgctgcgcgcgtcgacagctggctcgtctggccgctctactgggccgcgcagggcaccatgttctgggcgctcttcgtgctgggtcacgactgtggccatgggagcttctcaagcaacgccaagttgaacagcgtggttggacacatactccactcctccatccttgtcccataccacggctggaggattagccacaggacgcaccaccagaaccacggtcatgtcgagaaagacgagtcctggcaaccgctgtctgagaggctgtacaatagcctggactatatgacgaagaaattgaggttcaccatgccgtttcccatgctggcattcccattatacttgtttgcaaggagtccagggaaaaaaggttcacacttcaacccaagcagtgatctgttccaaccaaatgagaagaaggatgtgataacatcaactgcatcctggctggcaatggttgggattcttgctggtctgacctttgtgatgggccccctcaaaatgttaaagctctatgctgttccatacgtgatatttgttatgtggcttgattttgtcacatacttgcaccatcatggccatgaggacaagcttccttggtaccgtggaaaggaatggagctatctgcgcggaggattgacaacacttgatcgggactacgggtggatcaacaacgtacaccatgacattggaacccatgtcattcatcatcttttcccacaaatcccacattaccatcttgtcgaggcgactgaggccgcaaaaccagtgctgggaaaatattacaaagagccagagaaatcagctcccctcccattccacttacttggagtgctagccaagagcttaaacagcgaccactatgttagtgacaccggagacgtagtgtactaccaaactgacttgaaaactagttcttctgcacaaagctcggattga

SEQ ID NO: 130 - protein, 453 aa, Oryza longistaminata
MARLVLSECCGLTPLRLRGRGAIALPAPPSLTAGPRRPVPAAAAGGAIHREWALRVSAPTRLTSVVEEDNRGEEVVEEEARGSLAAAAVGGDGDGFDPGAPPPFGLAEIRAAIPKHCWVKDPWRSMSYVLRDVVVVLGLAAAAARVDSWLVWPLYWAAQGTMFWALFVLGHDCGHGSFSSNAKLNSVVGHILHSSILVPYHGWRISHRTHHQNHGHVEKDESWQPLSERLYNSLDYMTKKLRFTMPFPMLAFPLYLFARSPGKKGSHFNPSSDLFQPNEKKDVITSTASWLAMVGILAGLTFVMGPLKMLKLYAVPYVIFVMWLDFVTYLHHHGHEDKLPWYRGKEWSYLRGGLTTLDRDYGWINNVHHDIGTHVIHHLFPQIPHYHLVEATEAAKPVLGKYYKEPEKSAPLPFHLLGVLAKSLNSDHYVSDTGDVVYYQTDLKTSSSAQSSD

SEQ ID NO: 131 - DNA, 1059 bp, Oryza longistaminata
  CDS (1)..(1059): homologue/similar gene in O. sativa: Xa21_OsI_11115
atggcgcacgcgtctccctctcccatggactgccaccaccaccgccgccagctgctgctgcgctccccgtcgcggaggtcctcgccgccgggggccccggcccacgccgacgagcgcctccaccaccaccgcttcctccgccccggcgcgctcgcgcggctgcgcgactccaaggtcatcgcccgctcgctccggtccgccgccgccgccgcggcggtggccgcggtggaatcggatccgaggaacgaggtggaggaggacggcgaggagttcgcggtgtactgccggaggggaaaggggaggagaagggtggagatggaggaccggcatgtggccaaggtcgccctcggcggagaccccaaagtggccttttttggtgtattcgatggccacggcgggaaaagcgcggcggaattcgtcgccgagaacatgcccaagttcatggccgaggagatgtgcaaggtggacggcggcgacagtggcgagactgagcaggcagtgaagcggtgctacctgaagacggacgaggaattcctcaagagggaggagagcgggggcgcctgctgcgtcaccgctttgctgcagaaagacggcctcgttgtgtctaatgccggagattgccgtgccgttctcagccgcgccgggaaggcagaggcgctcacctctgatcaccgggcctcgcgcgaggatgagaaggaaagaattgagaatctgggtggattcgtggtgaattaccgaggaacatggcgagtccagggctccttggcagtgtcaagaggcatcggtgatgcacacctcaagcagtgggtggtgtctgatccagacaccacaactctgggtgttgattcgcagtgcgaattcttgattcttgcctctgatggtttgtgggacaaggtggagaaccaggaggcagttgacattgccaggccgctttgcatcagcaacgacaaagcttctcgcatgactgcttgcaggaggctcgtcgaaactgcggttactaggggctcgactgacgatatcagcattgtgatcatacagctgcagcaattctcaagataa

SEQ ID NO: 132 - protein, 352 aa, Oryza longistaminata
MAHASPSPMDCHHHRRQLLLRSPSRRSSPPGAPAHADERLHHHRFLRPGALARLRDSKVIARSLRSAAAAAAVAAVESDPRNEVEEDGEEFAVYCRRGKGRRRVEMEDRHVAKVALGGDPKVAFFGVFDGHGGKSAAEFVAENMPKFMAEEMCKVDGGDSGETEQAVKRCYLKTDEEFLKREESGGACCVTALLQKDGLVVSNAGDCRAVLSRAGKAEALTSDHRASREDEKERIENLGGFVVNYRGTWRVQGSLAVSRGIGDAHLKQWVVSDPDTTTLGVDSQCEFLILASDGLWDKVENQEAVDIARPLCISNDKASRMTACRRLVETAVTRGSTDDISIVIIQLQQFSR

SEQ ID NO: 133 - DNA, 2016 bp, Oryza longistaminata
  CDS (1)..(2016): homologue/similar gene in O. sativa: Xa21_OsI_11192(Os03g0301200)
atggcggggtgtactgttgttgtatttggggttctggtgctggtcgcggggatggcggcggcgcaggggcaggtgccgtcgccgacccccgcggcggcggcggcggcaccggcgcccgcgccggactgcaacggcatcctgctcacctacaacttcgagggccgcgccaagatccggccctacgtggcggacaggaacaagcagccctactcgttcagggccaacgccaccgtgctcaactccgggacgcgcccgctcaagtcgtgggcgatgctcgtgacgttcgggtacagggagatcctcgtcggcgtcgacggcgccgtgctcaccggcggcggcgagatgccgtacaacaccacccaggacgccggcaacgcgacgtcgttctccggctacccgcagaccgacctcctcaccccgatcgccaccgccggggacatctcgcagatccaggcttcggtcggcatcgtcggcacgctcttcgccgggccagggccgttcgtgccgctccccacggcgctgtcgctcgacgacccggcgtacaggtgcccccaggcgaccaatgtttcctccggggtgctctccacctgctgcgtcctcaccccggaggcggaggccaacgccaccgtcatcgacgccaacgccaccgacccgaccaagaacttcctcccccgcggcaccggcgacctcgtcatcacctacgacgtgctccaggcctacccctcgagctacctcgcgctcgtcacgctcgacaacaacgccaagctcggccgcctcgacaactggcggctttcctgggagtggcggcgcggcgagttcatctactcgatgaagggtgcgtacccatcggagaaggacacgaccggctgcatctacggggcggcagggcagtactatcagagccttgatttctcccaggtgctcaactgcgacaagaagccggtgatccttgacctgcctctctccaggtacaatgacacccagattgggaagattgaccattgctgcaggaatggcacaatcttgcccaagtccatggatgagacgcagtcgaaatcagccttccaaatgcaggtgttcaagatgccaccggacctgaaccggacaaagctttttccaccggccaatttcaagatagccggtgcatcatcactgaacccagactacacctgtggccagccggtgcccgtcagtcccacagagttccctgatccaagcgggcttgattcaacgactctggcgatcgcgacatggcaggtggtttgcaacattaccacgagtaagggggcgaagccgaagtgctgtgtgaccttctcggcatactacaatgattcagtgatcccctgcaacacctgcgcctgtgggtgtccggcgaaccagcggggtcctacttgcagcacgactgctcaatccatgctcctgccacccgaggcgctgcttgtgccgttcaacaatcgcacacagaaggcattggcatgggccgagttgaagcactacaatgtgcctaagccaatgccttgtggcgattactgtggtgtgagcatcaactggcacatatcaacagactacaacaagggatggagcgctcggatgacattgttcaattgggacaatgtcgacttggcgaactggtttgctgctattgtcatggacaaggcttatgatggttttgagaaggcgtactctttcaatagcacatcagttggcaagaacaccatcttcatgcaaggtcttgaggggctcaattacctggtgaagcagaccaacatgagtggatcagactaccttgttcctgggaagcagcagtcagtgctctcattcaccaagaagctgactcctagcatcaatgttgttgctggagatggtttcccttcaaaggtcttcttcaacggcgacgagtgcgcgatgcctcagaggattccaatgagcaatagtggattcaggacccatctcagcagtgtcctctcactggttttggtcctggctgcttcggccttcgtattgcttcagcaatag

SEQ ID NO: 134 - protein, 671 aa, Oryza longistaminata
MAGCTVVVFGVLVLVAGMAAAQGQVPSPTPAAAAAAPAPAPDCNGILLTYNFEGRAKIRPYVADRNKQPYSFRANATVLNSGTRPLKSWAMLVTFGYREILVGVDGAVLTGGGEMPYNTTQDAGNATSFSGYPQTDLLTPIATAGDISQIQASVGIVGTLFAGPGPFVPLPTALSLDDPAYRCPQATNVSSGVLSTCCVLTPEAEANATVIDANATDPTKNFLPRGTGDLVITYDVLQAYPSSYLALVTLDNNAKLGRLDNWRLSWEWRRGEFIYSMKGAYPSEKDTTGCIYGAAGQYYQSLDFSQVLNCDKKPVILDLPLSRYNDTQIGKIDHCCRNGTILPKSMDETQSKSAFQMQVFKMPPDLNRTKLFPPANFKIAGASSLNPDYTCGQPVPVSPTEFPDPSGLDSTTLAIATWQVVCNITTSKGAKPKCCVTFSAYYNDSVIPCNTCACGCPANQRGPTCSTTAQSMLLPPEALLVPFNNRTQKALAWAELKHYNVPKPMPCGDYCGVSINWHISTDYNKGWSARMTLFNWDNVDLANWFAAIVMDKAYDGFEKAYSFNSTSVGKNTIFMQGLEGLNYLVKQTNMSGSDYLVPGKQQSVLSFTKKLTPSINVVAGDGFPSKVFFNGDECAMPQRIPMSNSGFRTHLSSVLSLVLVLAASAFVLLQQ

SEQ ID NO: 135 - DNA, 2379 bp, Oryza longistaminata
  CDS (1)..(2379): homologue/similar gene in O. sativa: Xa21_Os03g0302200
atggggaagggaggggaaggggcggttcccgtgggggagagcggcgggcggcggcggaggaggctgggcgaggacggaggcgacgacgacgacgaggagtatgtggtggaggaggatgaggaggaagagtgcgacgaggatctgtctgcctcgagcgccggcgagggaggaggagagggcacagacgaggaatacgaagagggtgatgaggacgaagaggaggatgagaccccgcggccgaggcagcctgtcaagagccgcgagaatgggcagaaggggaaggcagacccacccgtggcgcgatctcgacgacgtaagtacgaggatgacgatgactactcggaagaagaagacgatggggtcgacgagtacgacgaggatcttgaggaggaggaagaggaggacgatgaggcgccacgatccaagcgcgtgaagaaacgtggtggccgcaacgtggaggggaagctttctccggagcgatcaaatcgccggaggtacgaggaggacatggactttgaccctgacatggatgaggaggaagaggaggatgttgatttcgatcctgaagtggaggatgaggaggaagaagattttgaggatgaggaagaggatgaattggaagcgactaaggtgagggttaagaatatggggcggcaaaagtctgctttgaatcagcgacgagggaagaagaagagcagctctaaggtggccagccggaaggtgggttcagtgaaggcaaggaaggctgcttctgcaagacggaggcagaaaaagcgttcaatgcttgatcgttatgaggatgacgacttcattgtggaggacgaggttacggctgattggcaaccaaggaaaaaggctagaattaggaagcagatggaggttgatcctccgacaccagtttttgaggctgagatatggcctactattgattcagacacgacagacttcgaatttgtaacatccgatgaggaagcagccattgctgagcctactagggttattaagaaggggaggaagaaaagggtatttgtgtcagattcatcctcagattctgaattcgttgtatcagataaggaattggggaatttgaaggagtctgagcctccagagtctctgaaagtgctgccttcatcacccaggaagatttctgttacaggtaatggggagcacaaggggaaggagaaaaaggaaccacaggaggctggaagggcaacgtgcgggatttgcctttctgaagaacagagagtgactgtgcagggtgtgctggattgctgttcacactatttttgctttgcatgcatcatgcaatggtctaaggttgagtcaaggtgtccattgtgtaaacggcggttcacaacaatcacaaagtcgtcaaaggaggatactggtttggaactgacaaattctgtaattagggttgaagaacgtgatcaggtttatcagcctacggaagaggaaataagacgttggctagatccatacgagaatgttgtgtgcatagagtgcaatcaaggtagtgatgacagtctcatgttactatgcgatatttgtgactcctcagcacatacttactgtgttggtttgggaagagaagtacctgaaggaaattggtactgtggaggttgtagactcgatggcgaagcacattcataccataatcatgtgaatggcaattctgggatgtttggtgcaatttcaccaattggcacttttgaaaggcaggggattgatctaaatgtatctccaagagagattcctaggggaaatcattctgttgagtctcaagcttctactgcaggagcatcaactccatctggaaggcagacaaacgcaacgaattttagaagacgtcaaatgcatgactggatacgcagtttgctttctagaccaaggacaacacttgggccagttatgcatcataatggtgtgcatcagagtggttttgtaccaagcactgaaccagaccacatgaacttttgcgcaccattagaatctgacactttacacaacactgggtctgtaccacgaagtgaaccaagccagaacttccatgttatgtcagaagccaacacttcagagacttcctttggaaggcatgcagctctttctgaaagacgtcaaatttatgaacgttttttcatgttgctatctagaccaagcccgactattagaccggacttgtgccataatgcctcagagcatggtagttctataccaagagttgaaccaaaccacatgaactttcatgctccgccagtagccaacagtccacaaactctgcttgatggcattccaaaccgcagcaatggtttttcttttactcaggcccacagtaattttgtagatggaaacaacttccaaggaactgaaggtgtctag

SEQ ID NO: 136 - protein, 792 aa, Oryza longistaminata
MGKGGEGAVPVGESGGRRRRRLGEDGGDDDDEEYVVEEDEEEECDEDLSASSAGEGGGEGTDEEYEEGDEDEEEDETPRPRQPVKSRENGQKGKADPPVARSRRRKYEDDDDYSEEEDDGVDEYDEDLEEEEEEDDEAPRSKRVKKRGGRNVEGKLSPERSNRRRYEEDMDFDPDMDEEEEEDVDFDPEVEDEEEEDFEDEEEDELEATKVRVKNMGRQKSALNQRRGKKKSSSKVASRKVGSVKARKAASARRRQKKRSMLDRYEDDDFIVEDEVTADWQPRKKARIRKQMEVDPPTPVFEAEIWPTIDSDTTDFEFVTSDEEAAIAEPTRVIKKGRKKRVFVSDSSSDSEFVVSDKELGNLKESEPPESLKVLPSSPRKISVTGNGEHKGKEKKEPQEAGRATCGICLSEEQRVTVQGVLDCCSHYFCFACIMQWSKVESRCPLCKRRFTTITKSSKEDTGLELTNSVIRVEERDQVYQPTEEEIRRWLDPYENVVCIECNQGSDDSLMLLCDICDSSAHTYCVGLGREVPEGNWYCGGCRLDGEAHSYHNHVNGNSGMFGAISPIGTFERQGIDLNVSPREIPRGNHSVESQASTAGASTPSGRQTNATNFRRRQMHDWIRSLLSRPRTTLGPVMHHNGVHQSGFVPSTEPDHMNFCAPLESDTLHNTGSVPRSEPSQNFHVMSEANTSETSFGRHAALSERRQIYERFFMLLSRPSPTIRPDLCHNASEHGSSIPRVEPNHMNFHAPPVANSPQTLLDGIPNRSNGFSFTQAHSNFVDGNNFQGTEGV

SEQ ID NO: 137 - DNA, 522 bp, Oryza longistaminata
  CDS (1)..(522): homologue/similar gene in O. sativa: Xa21_Os03g0306700
atgtcagttgcgccggcgacggaagggtccgcacgccgctcggcggcggcggcggcggaggaggaggaggagcggcagcgcaaccggaagaggtcgaaccggctgtcggcgcagaggtcccgcatgaagaagcagcagtacgtggacgggctggccgtggaggcggagcagctccggcgggagaacgacgccatgcgcgccgcggccggcgccgtgctgcagcggtgccgcctggtcgagcaggagaaccgggtgctcgccgcgcacgcgcgcgagctgtgcagcgcgctccagctccgcgcctcgcagctccccctgctcggggaggtggcaggcgtgcccctcgacgtgcccgacgtcgccgaccacctcgtgcagctctacggcggcggcctggggatgacgccgctctcgccaccgccgctgctgccgccgctgccgccgcagatcgagatgctgttcttccagccagactcggtcatggatccggtcagtatgctgcagggctacgaaaacatatga

SEQ ID NO: 138 - protein, 173 aa, Oryza longistaminata
MSVAPATEGSARRSAAAAAEEEEERQRNRKRSNRLSAQRSRMKKQQYVDGLAVEAEQLRRENDAMRAAAGAVLQRCRLVEQENRVLAAHARELCSALQLRASQLPLLGEVAGVPLDVPDVADHLVQLYGGGLGMTPLSPPPLLPPLPPQIEMLFFQPDSVMDPVSMLQGYENI

SEQ ID NO: 139 - DNA, 522 bp, Oryza longistaminata
  CDS (1)..(522): homologue/similar gene in O. sativa: Xa21_Os03g0310800
atgtgtcccggaggcagatacgcgggcctcgacgtccccgcctgcgcggcggcgggagacctgaggccggcgttcgacgtgctggacgcggaccgcgacggccgcatcagccgggaggacctcaagtcgttctacgccagcggcgcggccaccagcgagcggttcgacgacgaggacatcgccgccatgatcgccgcagccgacgcggacaacgacgggttcgtgcagtacgacgagttcgagcgcctgctggggcgcgccgccgcgggggcggggtgccggcccgcgatggaggacgtgctccgggtgatggaccgcgacggggacggcaaggtggggttcgacgacctcaaggcgtacctcggctgggccgggatgccggcggccgacgaggagatccgcgccatgatacgcgtggccggcggcggcgacggcgatggctgcgtggggctcgaggagctcgccatcgtcctcggctgctcgcccacaaattggaccgcatcctctcaaactctgcattga

SEQ ID NO: 140 - protein, 173 aa, Oryza longistaminata
MCPGGRYAGLDVPACAAAGDLRPAFDVLDADRDGRISREDLKSFYASGAATSERFDDEDIAAMIAAADADNDGFVQYDEFERLLGRAAAGAGCRPAMEDVLRVMDRDGDGKVGFDDLKAYLGWAGMPAADEEIRAMIRVAGGGDGDGCVGLEELAIVLGCSPTNWTASSQTLH

SEQ ID NO: 141 - DNA, 459 bp, Oryza longistaminata
  CDS (1)..(459): homologue/similar gene in O. sativa: Xa21_OsJ_10653(Os03g0321000)
atggcggcgcaggggatcgcggaggcggtgcaggcctacacgggcctctccccggcggcggccgtcaccatcctggccctcatgctcgccacctacctcctcgtgtcctccctcttcgtgggcgagatcacgctcgagcagctcgcggcctacgacggcaaggaccccgcgaagccgatcctcatcgccatccgcggccacgtctacgacgtcacgcgcgggaggctcttttatggtcctcaaggaccatattccttgtttgctgggagggatgcaactcgggcccttgcattgatgtcgtttgaccctattgacctcactggagatttggatggccttggtccagacgagctagaggtcttgcaagattgggaagataagtttaaagagcggtatcctacggtgggccaccttgcttcagaaaatgcagcggatggtaaccacggtggcgcagcttga

SEQ ID NO: 142 - protein, 152 aa, Oryza longistaminata
MAAQGIAEAVQAYTGLSPAAAVTILALMLATYLLVSSLFVGEITLEQLAAYDGKDPAKPILIAIRGHVYDVTRGRLFYGPQGPYSLFAGRDATRALALMSFDPIDLTGDLDGLGPDELEVLQDWEDKFKERYPTVGHLASENAADGNHGGAA

SEQ ID NO: 143 - DNA, 3096 bp, Oryza longistaminata
  CDS (1)..(3096): homologue/similar gene in O. sativa: Xa21_OsI_11859
atggcggagacgcgcaagttcttgatgcccaaccagcccccagatatttcgcagatggtgctggaggctaggaagcgatggttgcgacccactgaaatatgcgaaatactttcaaactacaggagtttctctctctcgcctgagccaccaaacaggcccggaagtggctctctttttctatttgaccgcaaaacattaagatacttcagaaaggatgggcataactggaggaagaaaaaggatgggaagaccgttaaagaagctcacgagaaactaaaagctggcagcattgatgttctacactgctactatgctcatggggaggaaaatgagaacttccaaagaaggacctattggctgttggaagaggatttcacgcacattgttctcgtacactatcttgaagtcaagggtgtaaagcaaagttttagtcgtgctaaagaagaaattatgcagttatctggtgctgatagtccatcgtgttcaaattcgattactagtcagaaccagatgaccccacaaataatggatgcagctgaaagcccaattagtgggcagatttcagagtatgaaggtgctgaaccagcgaaattcggtgcagcagataattgccgagcaagctccagatacaaccctctcattgagatgcagcagcctctggatggaatcgtgatggatagcattttatacccttctgcttcagccatctgtaaccaagtttcaggttatcatggtgaattgccaccaggaacatctaatctaaatggtcatacgtttactcacagtgacatagctagaatgtttgatgattccagctctgggctaagagacatttccagaaccctgtttgattcaatgccttacgatgagcatttatcaggatatgcaaatggattcatggagccaactcttcattcttcattttccatgatagaggctaacaatctggaggatagctctcttctggagacatttacatctgaagctctttacactaacaacctcagccagaaggaagctgatgcactaagttttgctggcatatcatcgccagaggtgaatggtaataaatatactgaaggaagcaccaagcatccactcctgaagcaattgtcattagatctatttaagattgagtcttctggtttaaagaaacatgacagcttttcaaggtggatgagtaaagaacttggagaggtggttgatttgggtatcaaatcaagttctgatgctctctggagtagcattgagattgtgaatgctgctgatggtcctagtacaccaattaatgaacagttagatgcttatgcagtgagcccttcacttgcgcaagaccaactattcagcattcttgacatttcaccaagctgctcatatattggtttgaagacaaaggttctggtaactggtacattcctggcaagtaaagagaatgtggaaaattgcaactggtcatgcatgtttggggatgttgaagtaccagctgaggttttagctgatggttccctacgctgctatgcaccagaacatcaatctggaagagttcccttttatgtgacatgctcaaacaggatcgcttgtagtgaagtgcgagaattcgagtaccgggattctgatgctcagtacatggagacatcacattctcaagccaatggtataaatgaaatgcatctacaaattcgtcttgagaggctactctctttggggccagatgacaatcaactgcttgtttgtggaaatgaaaaacttgagttaatcaatgctataaactccctgatgctcgatgagaaatggtcagatcagggatcgccatccggctctaaagatgttgtcaccccaaggaaccaaagtttaaagaaattgatgaaagaaaagcttcattgttggcttatctataaaataaatgattgtgagaagggcccaaatatactgggaaaggaaggacagggtataattcatttggtggctgcactgggcttcgattgggctataaggccaatactagttgctggtgtcaatgtgaactttcgggatgctcatggatggactgctcttcattgggctgcgtcttgtggaagagagcgaacagtgggcgtccttatagcaaatggagctgcagcaggtgcattgacagatcctacttctgaatttccttctggaagaactccagccgatttagcctctacaaatggacacaagggaattgctggttttctcgcggaatctgctttgacaagccatctatcagcactatctttaaaggactcaaaagatagcaatgtggaagaagcatgtggattaacaattcctgaagatctccctgaaatgtattctggtcagcttgctgtacaggattctcatgctgaatcattgaaggattcattaagtgctgttcgtaaatccgctcaagctgcagctaggatattccaagccttcagggtggaatcattccacagaaagaaggtcgtggaatatggagatgatgattgtggattatctgatgaacacacattttcacttatttctcttcaaaaggtcaaacaagggcaacatgatacacgtttgcattctgctgctgtacgtatccaaaataagttccgaggatggaagggaagaaaggagtttatgatcattcgccagagaattgtgaagttacaggctcatgtgcgaggacatcaagtgaggaaaaactataaaaaagtagtctggtcagtaggtattgtcgagaaagttatattgagatggaggagaaagggacgtggtttgcgtggctttcgacctgagaaacaattagaaggccaaacacaaatccaacctgcaaaaacagaggatgaatacgattacttgcaggatggcagaagacaggctgaaggcagactacagagggcactggaccgggtgcgctctatgacacaatacccagaagcaagagaacagtaccgtaggcttacaacttgtgttgctgaaatgcaacagtccaggatgatgcaggacgagatgttaagtgaggcagctggtgctgacggaagtgatttcatgaatggactggaggacttgatatgcagagacgacccccaaatgtctgccatttggtga

SEQ ID NO: 144 - protein, 1031 aa, Oryza longistaminata
MAETRKFLMPNQPPDISQMVLEARKRWLRPTEICEILSNYRSFSLSPEPPNRPGSGSLFLFDRKTLRYFRKDGHNWRKKKDGKTVKEAHEKLKAGSIDVLHCYYAHGEENENFQRRTYWLLEEDFTHIVLVHYLEVKGVKQSFSRAKEEIMQLSGADSPSCSNSITSQNQMTPQIMDAAESPISGQISEYEGAEPAKFGAADNCRASSRYNPLIEMQQPLDGIVMDSILYPSASAICNQVSGYHGELPPGTSNLNGHTFTHSDIARMFDDSSSGLRDISRTLFDSMPYDEHLSGYANGFMEPTLHSSFSMIEANNLEDSSLLETFTSEALYTNNLSQKEADALSFAGISSPEVNGNKYTEGSTKHPLLKQLSLDLFKIESSGLKKHDSFSRWMSKELGEVVDLGIKSSSDALWSSIEIVNAADGPSTPINEQLDAYAVSPSLAQDQLFSILDISPSCSYIGLKTKVLVTGTFLASKENVENCNWSCMFGDVEVPAEVLADGSLRCYAPEHQSGRVPFYVTCSNRIACSEVREFEYRDSDAQYMETSHSQANGINEMHLQIRLERLLSLGPDDNQLLVCGNEKLELINAINSLMLDEKWSDQGSPSGSKDVVTPRNQSLKKLMKEKLHCWLIYKINDCEKGPNILGKEGQGIIHLVAALGFDWAIRPILVAGVNVNFRDAHGWTALHWAASCGRERTVGVLIANGAAAGALTDPTSEFPSGRTPADLASTNGHKGIAGFLAESALTSHLSALSLKDSKDSNVEEACGLTIPEDLPEMYSGQLAVQDSHAESLKDSLSAVRKSAQAAARIFQAFRVESFHRKKVVEYGDDDCGLSDEHTFSLISLQKVKQGQHDTRLHSAAVRIQNKFRGWKGRKEFMIIRQRIVKLQAHVRGHQVRKNYKKVVWSVGIVEKVILRWRRKGRGLRGFRPEKQLEGQTQIQPAKTEDEYDYLQDGRRQAEGRLQRALDRVRSMTQYPEAREQYRRLTTCVAEMQQSRMMQDEMLSEAAGADGSDFMNGLEDLICRDDPQMSAIW

SEQ ID NO: 145 - DNA, 1830 bp, Oryza longistaminata
  CDS (1)..(1830): homologue/similar gene in O. sativa: Xa21_Os03g0645900
atggcgacgatcacgacgccgggatatgctcacatacagcggcagcacggcaggtgctcgacgacggcgggaaggcgtggggcgtccaattcggtgagattctccgcgcgcgcggttagctccgtgccgcacgcggcggcggcgtcgtcatcggcgccggcgttcctgccggtgccgttcgtgcctggggccgacgcgccgtcgccgtcggggaagagtgccattggcgtcccgaaggcgccgaggaagggggaggaggggaagaggctcaacttcttccagcgcgccgcggcgatggcgctcgatgcgttcgaggaagggtttgtggcgaatgtcctcgagcgcccgcacgggctgccgagcacggccgaccccgcggtgcagatcgccggcaacttcgcgccggtcggtgagacgccgcccgcgcgcgcgctgccggtgtcggggcgcatcccgcccttcatcaacggcgtctacgcgcgcaacggcgccaacccgcacttcgaccccgtcgccgggcaccacctgttcgacggcgatggcatggtgcacgccatcaggatacgcaacggcgccgccgagtcgtacgcgtgccggttcacggagaccgcgcggctgcggcaggagcgcgcgatggggcggcccatgttccccaaggccattggggagctccatggccactccggcatcgcgcgccttgctctgttctacgcgcgcgccgcgtgcggcctcctcgacccgtcgcatggcaccggcgtcgccaacgccggcctcgtctacttcaacggcaggctcctcgccatgtcggaggacgacctcccctaccaggtgcgcgtcaccgccgacggcgacctcgagaccgtcggccgctacgacttcgacgggcagctcggctgcgccatgatcgcgcaccccaagctcgacccggccaccggcgagctccacgcgctcagctacgacgtgatcaagaagccgtacctcaagtacttctacttcgcgcccgacggcaccaagtcggccgacgtcgagatcccgctcgaccagcccaccatgatccacgacttcgccatcaccgagaactacgtggtggtgcccgaccaccaggtggtgttcaagctccaggagatgctccgcggcggctcgcccgtggtgctcgacaaggagaagacgtcgcggttcggggtgctccccaagcacgccgcggacgcgtcggagatggtgtgggtggacgtcccggactgcttctgcttccacctctggaacgcgtgggaggaggcggacaccgacgaggtggtggtgatcggctcgtgcatgacccccgccgactccatcttcaacgagtccgacgaccgcctcgagagcgtcctcaccgagatccgcctcaacacccgcaccggcgagtccacgcggcgcgccatcctgccgccgtcgaggcaggtgaacctcgaggtgggcatggtgaaccgcaacctcctcggccgcaagacgcggtacgcctacctcgccgtggccgagccgtggcccaaggtgtcgggcttcgccaaggtggacctcgccacgggtgagctcaccaagttcgagtacggcgagggccggttcggcggcgagccctgcttcgtccccatggacgccgccgccgccacgcctcgcggcgaggacgacggctacatcctgtccttcgtccacgacgagcgcgccgggacctccgagctcctcgtcgtcaatgccgccgacatgcgccttgaggccaccgtgcagctgccgtcccgcgtgccgtacggcttccacggcacgttcatcaccggcgacgagctcaccacccaggcctga

SEQ ID NO: 146 - protein, 609 aa, Oryza longistaminata
MATITTPGYAHIQRQHGRCSTTAGRRGASNSVRFSARAVSSVPHAAAASSSAPAFLPVPFVPGADAPSPSGKSAIGVPKAPRKGEEGKRLNFFQRAAAMALDAFEEGFVANVLERPHGLPSTADPAVQIAGNFAPVGETPPARALPVSGRIPPFINGVYARNGANPHFDPVAGHHLFDGDGMVHAIRIRNGAAESYACRFTETARLRQERAMGRPMFPKAIGELHGHSGIARLALFYARAACGLLDPSHGTGVANAGLVYFNGRLLAMSEDDLPYQVRVTADGDLETVGRYDFDGQLGCAMIAHPKLDPATGELHALSYDVIKKPYLKYFYFAPDGTKSADVEIPLDQPTMIHDFAITENYVVVPDHQVVFKLQEMLRGGSPVVLDKEKTSRFGVLPKHAADASEMVWVDVPDCFCFHLWNAWEEADTDEVVVIGSCMTPADSIFNESDDRLESVLTEIRLNTRTGESTRRAILPPSRQVNLEVGMVNRNLLGRKTRYAYLAVAEPWPKVSGFAKVDLATGELTKFEYGEGRFGGEPCFVPMDAAAATPRGEDDGYILSFVHDERAGTSELLVVNAADMRLEATVQLPSRVPYGFHGTFITGDELTTQA

SEQ ID NO: 147 - DNA, 792 bp, Oryza longistaminata
  CDS (1)..(792): homologue/similar gene in O. sativa: Xa21_Os03g49430(Os03g0701100)
atggacgtcctgaagcgcgagctgcagcggaagcgccagctgctcgacgccgacttcggcggccgcaagctcctccgccgcgccgagatcgagcgccgcgagatggagcggatccgggaggccgagcgccggctcctcctccagaagcagctccggtcctcctcctcccaccaccgcgccgcgtcgcgctccacgaccacgccgggggctcccgacggcgacgagtcgtcgcgggccgagcaccggggcgacggggaggagaaggaggacgcgccgctcctccccagggaggaggtcatccggcgcctgcgcgtgctgcgccagccggcgacgctcttcggcgaggacgacgccgcgcgcctccgccgcctccacgccgtgctcgaggaccccgcggcgctcgccgacgtcgacgcggcggagatcggggagggccagaccaacgacttcctccgcgacatccaggcgctgcgggcgaagaccgtcgcggcgtcggtggcagcgaagcccaaggctggcgctgcaactgcagagagcgggggcgaggcgagggaggaggtaccgttcgaggagctctccgacgaggacaagatcatggccttcttcaagaggctgatgagcgagtggagccaggagatggacgagatgcccgaggcggagaggcggacggcgaaagggaaggctgcggtggccacctgcaagcagtgcgcgcgctatctcgagccgctgttcaagctgtgcaagaagaaggtatgtgacagtattaattcacgcacacacttaagaatctga

SEQ ID NO: 148 - protein, 263 aa, Oryza longistaminata
MDVLKRELQRKRQLLDADFGGRKLLRRAEIERREMERIREAERRLLLQKQLRSSSSHHRAASRSTTTPGAPDGDESSRAEHRGDGEEKEDAPLLPREEVIRRLRVLRQPATLFGEDDAARLRRLHAVLEDPAALADVDAAEIGEGQTNDFLRDIQALRAKTVAASVAAKPKAGAATAESGGEAREEVPFEELSDEDKIMAFFKRLMSEWSQEMDEMPEAERRTAKGKAAVATCKQCARYLEPLFKLCKKKVCDSINSRTHLRI

SEQ ID NO: 149 - DNA, 1959 bp, Oryza longistaminata
  CDS (1)..(1959): homologue/similar gene in O. sativa: Xa21_Os03g0703400
atgttctcgtggagccgtaagcagtcgtcctcctccggccgccgcggcgcggacgcgtcgtcgatggactccagcagccgcggcggcggaggggaagggagcgggagcgggagccgcgggcgtagctcgcggctggagcgccgcaacgcggtgaagcacatcgactacgaggcggcgggggcgggggcgggggcgtcgtccgtgccggcgtgcgcgtcgtggtcgtcgtccatgtcggcggagcggtcgctggggctccggccgtcgcgctcgctcgacctggccgtcgggggcggcggcacggacatccgcatcagcggcagcgtggagggggaggtcgacgagctgtgccgcagcctgggtttatcggggccggaggagttcgcgatccccgtcgccgcatgggaagcccggaaagagcgttctaactccgacctactaccgcgctcccgcttcgtctcctcgccacccgtcgacgacccctctcccatggcccgcaccatttccgcccccgaggtcatccagtgcgaccttcctccctcattccctgcttcaattcctgaggagtccctcaattcttcctccaattccaccgcaactgattcggcggaggagcctaccgctgcggcgctcggtcaggaatcccccaaggctgcccctgccgttgctgctgtggcacccctcgctggattgcccctgctatcgccaaagagaggaggcggcgaagtcggtatccgaggagcccgacctcctgtgctctccccgcctcagccgctcatggcactcgcaccgccgccaatgaggcgttcaattgtggctaaagacatgagcggggtgtcggcttgggatattgtgaactcgtttgctcccagtgaagagaaaagtgaagtgagaacagatgatgaacgcgtggacgcgtctcacatgtcggacaccgaggaggaggaggagtttgctgacgagggagtggcaggggtggacggggagctgaaagagttaaggataggagagacctttgaagggttcactgggacatcatcattgtcaacaacaaatgatgatgatgcatccagcacaactacggaggctatgttcatcatctcaccaaatggaaagttcaagaggaagattaagtcgtggatgcgtggtgctcttctggggagcggctcatttgggatggtgtatgagggcatcagtgatgaaggagcgttttttgctgtgaaggaagtatctttgcttgaccaaggaagcaacgcacaacaatctattcttgcacttgaacaggaaattgcactcctaagtcagtttgaacatgaaaatatagtccagtattatggaactgacaaggaagaatcaaaactgtacatttttattgagcttgttacacaaggttctctatcgtccctctatcaaaagtataaactacgagactcacaagtggcagcatacacaaggcagattctcaacggattggtttatctccatgagcgaaatgtggttcacagagacattaaatgcgcaaatatactggttcatgcaaatggatcagtaaaattggcagactttgggttggcgaaggagatgtcaaaaattaacatgctgagatcatgcaaaggaagtgtttattggatggcacctgaggttgttaatcctaaaaaaacatatgggccccaggctgatatttggagtcttggctgcactgtattggaaatgcttactcgtaacataccatatcctaatgtggagtggacaaatgctttttttatgattggaaaaggagaacgacctcaaattcccagctatttgtcaaaagatgctcaagatttcattagccagtgtgtacaagttgatccagagcaacggccttctgcatcacaacttatgtcacacccatttgttaatagaccgcttcgagcttcttttgaatctgcatcccctcctgccatcagctcgtattga

SEQ ID NO: 150 - protein, 652 aa, Oryza longistaminata
MFSWSRKQSSSSGRRGADASSMDSSSRGGGGEGSGSGSRGRSSRLERRNAVKHIDYEAAGAGAGASSVPACASWSSSMSAERSLGLRPSRSLDLAVGGGGTDIRISGSVEGEVDELCRSLGLSGPEEFAIPVAAWEARKERSNSDLLPRSRFVSSPPVDDPSPMARTISAPEVIQCDLPPSFPASIPEESLNSSSNSTATDSAEEPTAAALGQESPKAAPAVAAVAPLAGLPLLSPKRGGGEVGIRGARPPVLSPPQPLMALAPPPMRRSIVAKDMSGVSAWDIVNSFAPSEEKSEVRTDDERVDASHMSDTEEEEEFADEGVAGVDGELKELRIGETFEGFTGTSSLSTTNDDDASSTTTEAMFIISPNGKFKRKIKSWMRGALLGSGSFGMVYEGISDEGAFFAVKEVSLLDQGSNAQQSILALEQEIALLSQFEHENIVQYYGTDKEESKLYIFIELVTQGSLSSLYQKYKLRDSQVAAYTRQILNGLVYLHERNVVHRDIKCANILVHANGSVKLADFGLAKEMSKINMLRSCKGSVYWMAPEVVNPKKTYGPQADIWSLGCTVLEMLTRNIPYPNVEWTNAFFMIGKGERPQIPSYLSKDAQDFISQCVQVDPEQRPSASQLMSHPFVNRPLRASFESASPPAISSY

SEQ ID NO: 151 - DNA, 1389 bp, Oryza longistaminata
  CDS (1)..(1389): homologue/similar gene in O. sativa: Xa21_OsJ_12397(Os03g0722800)
atgaccaagccagaagccctgcaacttcaccatctgcccgatgatgtcctgcaccgcatactgtctcgattaacattcagagagtcctcacggatgggccttctttctcgcaagtggcagaaactgtggagaagctgctgcccgaaattgatcttcaccagggccaccatgttcaagcctgggaataaaaccataagacgtacaaggaccaactttgccaggagagtcaacagtcttttgcggcagctatgtgcacctcctaccctgaataagtttgttgttaagtttgggctgcgcaggaaacatacctgccatgtcaacagatgggttggcttctgctccaagtcgagagcaaggcacatcacttttgatttcactcctggagtgaagggtattttcaggggcttagctgatgaaaagtacatcttccacctgcatgttttcagtgtccctgaccgctcccctgctcatatcaaatcccttcatctgagctacgtctggttgaacacagcaaccactggtttcactggctttgcaaacctcaagaagctcaccctgcacaaagtttcctttttaaatgacttccaacatctgatgctgtcggagtgcactgctcttgagtggctgagcatcagctgctcttccttcactgagctaaccttgtgcaagccactgcgccgtctgcgttatctttctttgcactactgctacatggaaaaggttgagctggaagctccaaacctcacatcggtcgatttgaccaatcggccaattccgttggcactaagtgaatctctgaaggtgatggaggcaaacattaaactgctacataagagcgtgctttatggtgataatctggactacatctgcaccgagcttcctgccgctcttccgcatgtgcagaaactctccattacctcgacactctgcatctacgatgagttgcaaagttttgccaaaacctcagtgagattcatcaatttgaggcatctgagcttgtatttgcctctttatggggacggcaggtcagttggtgggattcttcgtttggcctacctcttggagctcgctccagttctagaggaactggaactgcactttcgcttctctgatttcgtcatcagacaggcgatcagagtggatatgctaccgtatcggcatgacaagctcaagagggtggtcatgtctggagcctgtcattggcaggggctgatcgagctagcacaccacattcgtcgttgtgctagtagacttgactgtatgatcatggatccgatggttagaattaagggtctcccgacggttgattggttggaggaaagaggccgcaggattgccaaagagcttcttaagaggcaggagtttcagggtgtcctcactgttttgtga

SEQ ID NO: 152 - protein, 462 aa, Oryza longistaminata
MTKPEALQLHHLPDDVLHRILSRLTFRESSRMGLLSRKWQKLWRSCCPKLIFTRATMFKPGNKTIRRTRTNFARRVNSLLRQLCAPPTLNKFVVKFGLRRKHTCHVNRWVGFCSKSRARHITFDFTPGVKGIFRGLADEKYIFHLHVFSVPDRSPAHIKSLHLSYVWLNTATTGFTGFANLKKLTLHKVSFLNDFQHLMLSECTALEWLSISCSSFTELTLCKPLRRLRYLSLHYCYMEKVELEAPNLTSVDLTNRPIPLALSESLKVMEANIKLLHKSVLYGDNLDYICTELPAALPHVQKLSITSTLCIYDELQSFAKTSVRFINLRHLSLYLPLYGDGRSVGGILRLAYLLELAPVLEELELHFRFSDFVIRQAIRVDMLPYRHDKLKRVVMSGACHWQGLIELAHHIRRCASRLDCMIMDPMVRIKGLPTVDWLEERGRRIAKELLKRQEFQGVLTVL

SEQ ID NO: 153 - DNA, 1410 bp, Oryza longistaminata
  CDS (1)..(1410): homologue/similar gene in O. sativa: Xa21_OsJ_12449(Os03g0730400)
atggctgctcaccgcgtggggcgatgcatgctcctgcaaccaccgcgcctcgccacctgcgtcctcttcctcctgctaccgctgctgctgctgccgtgctcggcgtcgtcgtcggtgatcacccacctcccgggctaccacggccgcttgccgttccaccttgagaccgggtacgttggtgtggatgaggagacgggcactgagctcttctactacttcgttgaatcggagaggagcccaagtacagaccctgtgatcctctggttgacaggcgggcctggctgctccggattcagcggtgtcgtctttgaagtaggacctatgaaatacgtgttggagccttataatggtagtttgccacaattggtttataatcggtattcatggacacagatggcaagcatcctcttcttggacactcctgttggttctggtttctcatacgctcatgatcctaaaggttataatgtcggggacatatcatcgtctttgcaagtcgtcacatttctgaagaagtggttcaatgatcacccacgctatctctcaaatcatttctatgttggaggaagctcatacgctggaaaggtgattccaattatcatgaagtacatttcagaagttacaggggtagttggcaaccccattagaggctcgaagattgatgataatttcaaaattccatattctcatggtgttgggatcatatctgatcaattatacgaggctgcagtagcaaactgcaatggagattatgtgaccacaacaaatgaattatgtgctaaggccctaaatgctattgataatctcatgtctgaagttgatgatggaaatatcttggatgataaatgtgttcgtgctacaccaaaacccataaatgatgtttcaagaagtaggagtctgctagaagattacattcggcaaagtgagccgactgttcgacctactatcaattgtttttcataccgttactatctatcattcttgtggatgaacaacaatatgactagagaagctcttaagatcaagaagggaacagtcggcgaatggataagatgcaagacagggctaccctatgttaaagatgtcgcaagcagcatcaagtatcattttgacctcaccacaggaggttaccgggcacttgtgttcagtattccatgtcttaaaaattattatgacatttatgaatgcagtggtgaccatgatctcacgttgccatttctgagcacccaggcatggataagatccttgaacttctccatagttgatgagtggagagcatggcatgtggatggccaggctgcaggatttacaattttgtacgccaacaacttgacctttgccacagtaaagtgtccagcccttcacaattcacatactggctttctgaagaatcctaaacaaggtttatga

SEQ ID NO: 154 - protein, 469 aa, Oryza longistaminata
MAAHRVGRCMLLQPPRLATCVLFLLLPLLLLPCSASSSVITHLPGYHGRLPFHLETGYVGVDEETGTELFYYFVESERSPSTDPVILWLTGGPGCSGFSGVVFEVGPMKYVLEPYNGSLPQLVYNRYSWTQMASILFLDTPVGSGFSYAHDPKGYNVGDISSSLQVVTFLKKWFNDHPRYLSNHFYVGGSSYAGKVIPIIMKYISEVTGVVGNPIRGSKIDDNFKIPYSHGVGIISDQLYEAAVANCNGDYVTTTNELCAKALNAIDNLMSEVDDGNILDDKCVRATPKPINDVSRSRSLLEDYIRQSEPTVRPTINCFSYRYYLSFLWMNNNMTREALKIKKGTVGEWIRCKTGLPYVKDVASSIKYHFDLTTGGYRALVFSIPCLKNYYDIYECSGDHDLTLPFLSTQAWIRSLNFSIVDEWRAWHVDGQAAGFTILYANNLTFATVKCPALHNSHTGFLKNPKQGL

SEQ ID NO: 155 - DNA, 903 bp, Oryza longistaminata
  CDS (1)..(903): homologue/similar gene in O. sativa: Xa21_Os03g0741100
atgcaaatggagtcgtactacggcgcgttccacgccgacgaggccgcgttcttcttcccccaccacgtgccggcgtcgccggagctgccgttcggcctcattgcgtcgccggagccggagccggagccggcggcggcggaggaggcgaggcagagcgcgttccgggagtacggcggcgcggtgcacgccggtgcgccggcggcggcgggggctgtcaccaccggtgggacgaacatccaccggagggtgatggacgtgctggggaggatgggcggcggcggcggcggcggcggaggggagaagggggagggggaggagatggaggaggaggaggaggtgccgcagcggcggcggcgcgggcagggcgccgacgtggagagcagccgcggtttccgccacatgatgcgcgagcgccagcgccgcgagaagctcagccagagctacgccgacctctacgccatggtctcctctcgctccaagggggacaagaactcgatcgtgcagtcggcggcgatctacatccacgagctgaaggtcgcgagggaccagctgcagaggaggaacgatgagctcaaggcccagatcatgggccacgacgagcagcagccgtgcgtcacggtgcagttcgaggtcgacgagccgtcgtcgtcgatcgactccatgatcgccgcgctccggcggctcaagggcatgagcgtcaaggcgcgcgggatccggtcgagcatgtccgggaacaggctgtggacggagatgaacgtcgagaccacgattgcggcttgtgaagtggaaaaggcagttgaagaggctctcaaggaagtagagaggaaccagcctgacagcgatgccccatttcctggaagcaaaggctggacacagacatctcatgtgcaaaatgtgttttga

SEQ ID NO: 156 - protein, 300 aa, Oryza longistaminata
MQMESYYGAFHADEAAFFFPHHVPASPELPFGLIASPEPEPEPAAAEEARQSAFREYGGAVHAGAPAAAGAVTTGGTNIHRRVMDVLGRMGGGGGGGGGEKGEGEEMEEEEEVPQRRRRGQGADVESSRGFRHMMRERQRREKLSQSYADLYAMVSSRSKGDKNSIVQSAAIYIHELKVARDQLQRRNDELKAQIMGHDEQQPCVTVQFEVDEPSSSIDSMIAALRRLKGMSVKARGIRSSMSGNRLWTEMNVETTIAACEVEKAVEEALKEVERNQPDSDAPFPGSKGWTQTSHVQNVF

SEQ ID NO: 157 - DNA, 465 bp, Oryza longistaminata
  CDS (1)..(465): homologue/similar gene in O. sativa: Xa21_Os03g0743500
atggaagggctgacgagcgagcagatggtggcgttccaggaggcgttcttgctcttcgacaagaacggcgatggatgcatcaccttggaagagctggctgcggtgactcgttctcttggccttgagccgaccgatcaggagctcaacgacatgatgagggaagttgatacggatggcaatgggatcatagattttcaggagttcctgagtctcattgccaggaagatgaaggatggggatggagacgaagagctgaaagaagctttcgaggtcctagacaaggatcagaatggttttatctccccaactgagctgaggacagtgatgaccaatcttggggagaagatgacagacgaggaggttgagcagatgataagggaggcggataccgatggcgacgggcaggtgaactacgatgaatttgtgataatgatgaaaaacgctgaacggaagatatctgggtga

SEQ ID NO: 158 - protein, 154 aa, Oryza longistaminata
MEGLTSEQMVAFQEAFLLFDKNGDGCITLEELAAVTRSLGLEPTDQELNDMMREVDTDGNGIIDFQEFLSLIARKMKDGDGDEELKEAFEVLDKDQNGFISPTELRTVMTNLGEKMTDEEVEQMIREADTDGDGQVNYDEFVIMMKNAERKISG

SEQ ID NO: 159 - DNA, 837 bp, Oryza longistaminata
  CDS (1)..(837): homologue/similar gene in O. sativa: Xa21_Os03g0748900
atggagggcgagaggagggcggtgaggacggtgcgggtgcggaacatctcagatctggcaggggagcgggaggtgcgggagttcttctccttctccggcgaaatcgagcacgtcgacatcagatgcgatggggtggcgacggggaggacggcctacgtcacgttcaaggatcccaaggccctagagatcgcgctgctgctgtcgggagcaacaattgtggatcgggttgtcaacataacccctgctgaagactacatctacatccctgtttctgaccagcaacttgtggtcagtgaggtggtcggtgaggtgactagtacggctcctaatgcagatttggaccaacctaccgaggccaatgccagccccactactggccgtgtttatgtcagcaaggctcatgatgtcatgacaactgtgattgcaaggggttcagcaatgcgacaagatgctgtgaacaaagctaaagcattcgatgagaaacatcaattgagggcaaatgcatcggccaagatcaattcctttgataagcgtgttggaatttcagagaagataaacagcgggataacagttgtaaatgagaaagtgaaatctgtagaccaaaggctacatgtttctgacaaaacaatggctgctttgctggctgcagagcgcaagctaaatgacactggctctgctgtgaaaaccaacaggtatgtgtctgctggaacaagttggctaaatggtgccttcagcaaggttgctaaggctggtcatgttgctggctcaagaacaagagagaagttccaaatagctgtgtccaatctaacagcgaaaggtcctgctgttgttgcttga

SEQ ID NO: 160 - protein, 278 aa, Oryza longistaminata
MEGERRAVRTVRVRNISDLAGEREVREFFSFSGEIEHVDIRCDGVATGRTAYVTFKDPKALEIALLLSGATIVDRVVNITPAEDYIYIPVSDQQLVVSEVVGEVTSTAPNADLDQPTEANASPTTGRVYVSKAHDVMTTVIARGSAMRQDAVNKAKAFDEKHQLRANASAKINSFDKRVGISEKINSGITVVNEKVKSVDQRLHVSDKTMAALLAAERKLNDTGSAVKTNRYVSAGTSWLNGAFSKVAKAGHVAGSRTREKFQIAVSNLTAKGPAVVA

SEQ ID NO: 161 - DNA, 2091 bp, Oryza longistaminata
  CDS (1)..(2091): homologue/similar gene in O. sativa: Xa21_SORBIDRAFT_01g006820(Os03g0770800)
atggcgccgtggagcggcttatggggcgggaagttggccgccgccggcggcggcggcggcgaccactaccggggcacgccggtggtggtcaagatggagaaccccaactggtccatctccgagatctcctcgccggatgacgacgacgacgaggagttcttggtcggcggccgccgcaagggggggcgcggcaagaacgccaagcagatcacctgggtgctgctgctcaaggcgcaccgcgccgccgggtgcctcgcgtcgctggcctccgcggccgtcgcgctcggcgccgccgccaggcggagggtcgccgccgggaggacggacgccgacgcctccgccgccgccgccggcgagagccccgtgctccgctcccgcttctacgcgttcatcagggcattcgtcgtcctctcggtgctgctcttcattgtcgagctcggcgcctacatcaatggctgggacgacctcgccgcctccgcgctcgccctccccgtcatcggcgtcgagtcgctctacgcgtcgtggctgcgcttccgcgccacctatgtcgccccattcatccagttcctgaccgacgcatgcgtcgtgctcttcctcatccagagcgccgaccgcctcatccagtgcctcggctgcttctatatccatctcaagcgcatcaagcctaaccccaagtcaccggcattgcccgacgccgaagaccccgacgccgcgtactaccccatggtactcgtgcagataccaatgtgcaacgagaaggaggtttatcagcaatcaattgcggccgtgtgcaatcttgattggccgaggtccaacttcttggttcaggtattggatgattcggacgatccgacgacgcagacgctgatcagagaagaggtgctcaagtggcagcagaacggcgctcggattgtgtaccggcatcgtgtccttagggatggttataaggctggaaatctcaagtcggcgatgagctgcagctatgtcaaggactatgagtttgttgccatctttgatgcggacttccaaccaaatccggacttcttgaagcgaaccgtgccacatttcaaggacaatgatgaattggggctagtgcaagcaagatggtcatttgtgaataaggatgagaacctattgactcgtctgcaaaacattaatctttgcttccactttgaggtagaacagcaagtgaatgggatattcctaaacttcttcgggttcaatggcactgctggtgtgtggagaatcaaggcattggatgactcgggagggtggatggagcgtaccacagtggaggacatggacattgcagtccgggcacacctcaggggctggaaatttatcttcctaaatgatgtcgagtgtgaattgccagagtcatacgaagcttatcggaagcagcagcatcggtggcattctggtccaatgcagctattcagactctgcttaccagacattatcaaatgcaagattgcattttggaagaaagccaacttgatcttccttttcttccttctccggaagctcatactaccattctactctttcacgctcttctgcatcatcctcccaatgacgatgtttgtgcctgaagccgagctccctgactgggtcgtatgctacattcctgccctgatgtccttgctcaacatcctgccttctccgaagtctttccctttcatcatcccatacctacttttcgagaacaccatgtccgtgacaaaattcaatgccatgatctctggtctgttccagcttggaagtgcatatgagtgggtggtgaccaagaagtcaggccgatcatcggagggcgacctcatttctttggcacccaaagagttgaaacaccaaaaaactgaatcggcgcctaacctcgacactattgcaaaggagcagtccgctcctagaaaggacgtaaagaagaagcacaaccggatatacaagaaagagcttgcactctcattgctcctcctaaccgctgcggctcgcagtttgctctcgaaacagggtatacatttctacttcctcctgttccagggcatatctttcttgttagtaggccttgatctcataggcgagcagattgagtaa

SEQ ID NO: 162 - protein, 696 aa, Oryza longistaminata
MAPWSGLWGGKLAAAGGGGGDHYRGTPVVVKMENPNWSISEISSPDDDDDEEFLVGGRRKGGRGKNAKQITWVLLLKAHRAAGCLASLASAAVALGAAARRRVAAGRTDADASAAAAGESPVLRSRFYAFIRAFVVLSVLLFIVELGAYINGWDDLAASALALPVIGVESLYASWLRFRATYVAPFIQFLTDACVVLFLIQSADRLIQCLGCFYIHLKRIKPNPKSPALPDAEDPDAAYYPMVLVQIPMCNEKEVYQQSIAAVCNLDWPRSNFLVQVLDDSDDPTTQTLIREEVLKWQQNGARIVYRHRVLRDGYKAGNLKSAMSCSYVKDYEFVAIFDADFQPNPDFLKRTVPHFKDNDELGLVQARWSFVNKDENLLTRLQNINLCFHFEVEQQVNGIFLNFFGFNGTAGVWRIKALDDSGGWMERTTVEDMDIAVRAHLRGWKFIFLNDVECELPESYEAYRKQQHRWHSGPMQLFRLCLPDIIKCKIAFWKKANLIFLFFLLRKLILPFYSFTLFCIILPMTMFVPEAELPDWVVCYIPALMSLLNILPSPKSFPFIIPYLLFENTMSVTKFNAMISGLFQLGSAYEWVVTKKSGRSSEGDLISLAPKELKHQKTESAPNLDTIAKEQSAPRKDVKKKHNRIYKKELALSLLLLTAAARSLLSKQGIHFYFLLFQGISFLLVGLDLIGEQIE

SEQ ID NO: 163 - DNA, 1800 bp, Oryza longistaminata
  CDS (1)..(1800): homologue/similar gene in O. sativa: Xa21_Os03g0788500
atggggaacacatgcgtcggccccagcatcagcaagaacggcttcttccagtccgtctccacggtgctctggaaggcgcgccaggacggcgacgacgtgctgcccggcgccaatggcggccctgacggcggcggccagggccggttgccggcgccgccgccgccgacttccgacgcgccgctcgccgtccaaaacaagccccccgagcacgtcaagatcgtctcgaccacggacaccgcctccgccgagcaggacgcctccaagtcgagcgccggctcggactccggcgaggccgccaggccgcggccgagggtgccgccggtgaagcgcgtctccagcgccgggctgctcgtcggctcggtgctgaagcgcaagacggagagtctcaaggacaagtacagcctggggcggaagctcgggcaggggcagttcgggacgacgtacctgtgcgtggagcgcgccaccggcaaggagttcgcctgcaagtccatcctgaagcggaagctggtcaccgacgacgacgtcgaggacgtccgccgcgagatccagataatgtaccacctcgccggccaccccaacgtgatctccatcaggggcgcctacgaggacgccgtcgccgtgcacctcgtcatggagctctgcgccggcggcgagctgttcgaccggatcgtccagaaggggcactacaccgagcggaaggcggcggagctcgccagggtcatcgtcggcgtcgtcgaggtgtgccactccatgggcgtgatgcaccgcgatctcaagcccgagaacttcctcttcgccgaccagacggaggaggccgctctcaagaccattgactttggtctctccattttctttcgcccaggtcaagtattcactgatgttgttggtagcccttactatgtcgcgccagaagttctgaaaaagaaatatggtcaagaggcagatgtctggagcgctggtgtgataatttacatcttgttgtgtggtgtgccgccattttgggcagagaacgagcagggtatatttgaagaggttttgcatggtagacttgactttcagtcagaaccatggcctagcatctctgaaggtgccaaagatctcgtaaggagaatgcttgttagggacccgaagaagagattgacagctcatgaagttttaaggcatccatgggtccaggttggtggtttggctcctgacaagcccctggattctgctgttctatctcgtatgaagcaattctcagctatgaataagctgaaaaagatggctcttagggtcattgcagagaacctatctgaagacgaaatcgccggcctgaaagaaatgttcaagatgatcgacacagacaacagtggacagatcaccttcgaagaactcaaggttgggctgaaaaaagttggtgctaacctccaagaatccgagatctacgtactcatgcaagccgcggatgtagataacagcggcacgatagattacggggagttcatcgctgcaactctgcatatgaacaagatcgagcgggaggatcacctgttcgcggcgttccaatacttcgacaaggacggcagcggctacatcacggccgatgagctgcagctcgcctgcgaggagttcggcttgggagacgttcagctcgaggagatgatcagagaagtcgacgaagacaacgatggtcgcatagattacaacgagttcgtggcgatgatgcagaagccgacgatggggctcccggcgaagaagtccggcgggctgcagaacagtttcagcatcggcttcagggaggccttgaggatgtcttga

SEQ ID NO: 164 - protein, 599 aa, Oryza longistaminata
MGNTCVGPSISKNGFFQSVSTVLWKARQDGDDVLPGANGGPDGGGQGRLPAPPPPTSDAPLAVQNKPPEHVKIVSTTDTASAEQDASKSSAGSDSGEAARPRPRVPPVKRVSSAGLLVGSVLKRKTESLKDKYSLGRKLGQGQFGTTYLCVERATGKEFACKSILKRKLVTDDDVEDVRREIQIMYHLAGHPNVISIRGAYEDAVAVHLVMELCAGGELFDRIVQKGHYTERKAAELARVIVGVVEVCHSMGVMHRDLKPENFLFADQTEEAALKTIDFGLSIFFRPGQVFTDVVGSPYYVAPEVLKKKYGQEADVWSAGVIIYILLCGVPPFWAENEQGIFEEVLHGRLDFQSEPWPSISEGAKDLVRRMLVRDPKKRLTAHEVLRHPWVQVGGLAPDKPLDSAVLSRMKQFSAMNKLKKMALRVIAENLSEDEIAGLKEMFKMIDTDNSGQITFEELKVGLKKVGANLQESEIYVLMQAADVDNSGTIDYGEFIAATLHMNKIEREDHLFAAFQYFDKDGSGYITADELQLACEEFGLGDVQLEEMIREVDEDNDGRIDYNEFVAMMQKPTMGLPAKKSGGLQNSFSIGFREALRMS

SEQ ID NO: 165 - DNA, 930 bp, Oryza longistaminata
  CDS (1)..(930): homologue/similar gene in O. sativa: Xa21_Os04g0301500
atggacgccgagatggccatgggcgagagcttcgcctactactgggagacgcagcgctacctcgagtccgaggagctcgacagcatgtacctgccgacgcaggatgactccaactacgagtcgagctcgccggacgggtcgcactcgtcgtcggcgaccgcggcggccgtcggcggggacgccgccgccgcggtggctggtggtggcggcgggatgatgatgatgatgggcggcggcagcagcggtggtggcgacgacgccggtggcgcgaacaagaacatcctcatggagcgcgaccgccgccgcaagctcaacgagaagctctacgcgctccgcagcgtcgtgcccaacatcaccaagatggacaaggcgtcgatcatcaaggacgcgatcgagtacatccagcgcctgcaggcggaggagcagcagatgctccgggaggtcgccgcgctcgagtccgccgccgcggcgagcgccgccccggcagcggcgaacccgttcgccggcctcggcgccgacgaggaacacgagtacggccaccaccacccctcgtcgtcgtcggagcggacgaagaaggtgaagcgggcgctgtccgtgtcgtccatcagcgacgccctgctcgccgcggcggcgccgccgccgccggtggagatccaggagctgcgcgtgtcggaggtgggcgacagggtgctggtggtgagcgtgacgtgcagcaagcgccgcgacgccatggcccgggtgtgccgcgccctcgaggagctccgcctccgcgtcatcaccgccaacatcacctccgtcgccggctgcctcatgcacacactcttcgtcgaggtagatcacatggacagtgtccaaatgaagcagatggtggaggctgctctctcccagcttgtggcgaccggcagtccgttgagctccatgagctattag

SEQ ID NO: 166 - protein, 309 aa, Oryza longistaminata
MDAEMAMGESFAYYWETQRYLESEELDSMYLPTQDDSNYESSSPDGSHSSSATAAAVGGDAAAAVAGGGGGMMMMMGGGSSGGGDDAGGANKNILMERDRRRKLNEKLYALRSVVPNITKMDKASIIKDAIEYIQRLQAEEQQMLREVAALESAAAASAAPAAANPFAGLGADEEHEYGHHHPSSSSERTKKVKRALSVSSISDALLAAAAPPPPVEIQELRVSEVGDRVLVVSVTCSKRRDAMARVCRALEELRLRVITANITSVAGCLMHTLFVEVDHMDSVQMKQMVEAALSQLVATGSPLSSMSY

SEQ ID NO: 167 - DNA, 2439 bp, Oryza longistaminata
  CDS (1)..(2439): homologue/similar gene in O. sativa: Xa21_Os04g0398800
atggcggaggcggggcctagctggccggccgccgccgccggcgacttcccggagctcctcgccttctgcgcccgcgcggaggccctcatcgccgagctcctcctcctctccgaccgcgccccgccgcagttcgccgaccgccgcttccaccccgtcctcttcgacttccgatacttcgactccccgggcgaattcgaggcgaggatcgagggcaacatcgagctggaggccctggaagacgagctccgcgattcctgcggctcctacatgcggaggttcttcgccttgctggatgctgccgtcgcttaccacgccgagctgtgcagctacctcaacgacctgcaggaagggctgtatgtgcattgcacattggatggtgtactggagagcaactgggcttgccaattgcttacagagtcgatgactttgtttgggtgtatggttctgctaatggagcacaggattagcggattgctgcgcgagagacttctggtggcgtatatgcggcacgagcgttgcttcagcttccctaatgtggagcgcatatgcgagctctgtcgtcagcatgcgactgcacctccttcgcctggtgcctccggttcatcgttgcatagtgcggaaatcatctctgtacagaagcctgaggacctgctgaggaggtttcagtttcccgagctcgttgtcgatgctgtcataacttgcttgagaaatggtgatgtttacaacaatgtccggttctaccctgatccgcagcaccggacaaccgctctctcattgcaaggtggacaaatgtatgtgttgttattttattctcgtgaccttctacacaacggtttggctatgcgggagattattgatcgcttctttaaggacaactgggtggttcccatcttcttgcatttctcggtagatttacttgtctcatgggatgcattcaaagaagcgaaatcatcattagtttcttgcctttctcccaccttcatacgtgatcgcagtctataccactatacaaaggtatcttctcttctagctgacctggatagtcatatgcatgcggtaaacaaggaatatgttctggataattctctgaatcttctttctatcatcagagagtgcaattgcacactgcgttggcttttgcttcaccgcatgacaaatgataagaaggcaagggacctagtgatctgtttagggtcatcacaacatgctgacgaagggaagctgttacagctcctaatgaagactgctaaacttgagtttgaggtgaaggaactgcatgctgaactattgaaaaccagaaaaagtatgtggtatgagaagaggcatgatgctttggaatgtatgaaggacctgtctcagaactatcttgggatttgggctgcttcatgcaaattaaaaaacaagagcatcaaagactggttggagcacctgtcatcagaggttagctccctggattatgccacaattggaaactccggcaggataattcatcgtgtgctatctacgctaaaagatattgagctacttcaccaaatcaaagagaatatacagataaagcatggcttctccaaaatacagaagaatcttcatgatatgataaaagttctaaacctaaaccaagagtccataagtgttttctcagtgattactgatggtaagtatgcatggggttatcttacttattttgaggaacttcttaagaagaagatcagtcaagatccatcagagtctttatttttgcatacgatgtttcttaaatttcaatcatggttggatgcaccgctgcagaggatcaagcagtacgaaagtccagatcttcaatatgtctcaacctactatgtttcaaagtatgcagctaaaatatttgcagttctagatattatcccggctatattgcttaaaatttctattgctgtggattacatcaatgctgaacagtccactcatctaataaatcgcatcaacaaggaaacattggaagatctcatgcagttggatcaacaactatgtcaagcacagcaagcttccaaactatgcattgtttcagagggccttttgaacatgtcaaagaactttgatggccttatagatctgaatttaggtggatggcttaagcaaatgataaaaaaggagttagtaagccaactacaaggcaagctgaaagccttatcattgctcatttatggtgatatagaaggcaatctcatgtcattgtcaaattatatgctttcacagatgcagagaatggaattcctacagcacatactgcacattgaggggtgttcaatctgggaagaaacattgactgctgtgctagaagaatgtgctaaaagggaggtcttagagtttatgggatgcatgcaaccatccactaatatggtgaaaccatcgaatcatatgtccaatccgggcactttttttggtaatattttagattaa

SEQ ID NO: 168 - protein, 812 aa, Oryza longistaminata
MAEAGPSWPAAAAGDFPELLAFCARAEALIAELLLLSDRAPPQFADRRFHPVLFDFRYFDSPGEFEARIEGNIELEALEDELRDSCGSYMRRFFALLDAAVAYHAELCSYLNDLQEGLYVHCTLDGVLESNWACQLLTESMTLFGCMVLLMEHRISGLLRERLLVAYMRHERCFSFPNVERICELCRQHATAPPSPGASGSSLHSAEIISVQKPEDLLRRFQFPELVVDAVITCLRNGDVYNNVRFYPDPQHRTTALSLQGGQMYVLLFYSRDLLHNGLAMREIIDRFFKDNWVVPIFLHFSVDLLVSWDAFKEAKSSLVSCLSPTFIRDRSLYHYTKVSSLLADLDSHMHAVNKEYVLDNSLNLLSIIRECNCTLRWLLLHRMTNDKKARDLVICLGSSQHADEGKLLQLLMKTAKLEFEVKELHAELLKTRKSMWYEKRHDALECMKDLSQNYLGIWAASCKLKNKSIKDWLEHLSSEVSSLDYATIGNSGRIIHRVLSTLKDIELLHQIKENIQIKHGFSKIQKNLHDMIKVLNLNQESISVFSVITDGKYAWGYLTYFEELLKKKISQDPSESLFLHTMFLKFQSWLDAPLQRIKQYESPDLQYVSTYYVSKYAAKIFAVLDIIPAILLKISIAVDYINAEQSTHLINRINKETLEDLMQLDQQLCQAQQASKLCIVSEGLLNMSKNFDGLIDLNLGGWLKQMIKKELVSQLQGKLKALSLLIYGDIEGNLMSLSNYMLSQMQRMEFLQHILHIEGCSIWEETLTAVLEECAKREVLEFMGCMQPSTNMVKPSNHMSNPGTFFGNILD

SEQ ID NO: 169 - DNA, 843 bp, Oryza longistaminata
  CDS (1)..(843): homologue/similar gene in O. sativa: Xa21_Os04g0459600
atggcggcgcggcggaggcacgcggctgtggtggttgcaggggtggcggctgcgggggagtgggtggtggtgaccgcctgggcagggaaccggcttgggcgttgtcgccggcggaggtggaggtggaggaggtggggacgaaccaggagctgctgcggcggacggggctcccgccacgggaccgcgccatcgtcgtcaacctggaccgtcgcgccgcttgtccgggagctccgctcccgcctctccgcctctccaacccccgcacagtcgccgtcgccgccgcagaagaatataaaggatgctgtcacccaacggtgctggaatgctgaggactcaggactgagtgaggtgttcgttgacccggctcgcgacaagagcctcatcttcgacctgctcgacctcaagggcgaggtggaggacggcaacagtgcactttggttcctgcgcgacatcgccaatgagcaggatgcgggggacaacttggtggttgagcattctgggatgattgagctaagtggtctgcgatttggagatgctcctgcagtggctggaactgcggttggtcagctggctatctcaaaaggaaggcaaggcagagaagcacagaacattgttcgactttacttggccaatatacgcctcaagaatgcagctactgatgtagttattactgcatatgagccactgttgataaaccccttgagtgaaagcgccagtgcagttgcagccggtccagcagtaccagcagaacaagcaggatgcttagcaatgtctgagatcttcaagctcgccgtgatgaacttcaatgtccatgactggaatcttttcaatggcagcagttga

SEQ ID NO: 170 - protein, 280 aa, Oryza longistaminata
MAARRRHAAVVVAGVAAAGEWVVVTAWAGNRLGRCRRRRWRWRRWGRTRSCCGGRGSRHGTAPSSSTWTVAPLVRELRSRLSASPTPAQSPSPPQKNIKDAVTQRCWNAEDSGLSEVFVDPARDKSLIFDLLDLKGEVEDGNSALWFLRDIANEQDAGDNLVVEHSGMIELSGLRFGDAPAVAGTAVGQLAISKGRQGREAQNIVRLYLANIRLKNAATDVVITAYEPLLINPLSESASAVAAGPAVPAEQAGCLAMSEIFKLAVMNFNVHDWNLFNGSS

SEQ ID NO: 171 - DNA, 1425 bp, Oryza longistaminata
  CDS (1)..(1425): homologue/similar gene in O. sativa: Xa21_Os04g0464966
atgcgacgcgagcgcgacgcgacgcaaatcccggagaaccctatggagatggaggggatcccccagaccgccgcggcggcggcggcggaggcatctgagccaccgcgcaagcgcgcccgcgtcgacgacgacggcggcggcggcgcgggggaggaggaggaggaccggctgagcgaactgccggactgcctcctggaggacatcctggcgcatctcgggtcccgccaggccgtgcagacgagcgtgctgtcgcggcggtggcggaacctctggcgcggcgtgcgggtcgtggacatcgacgtggggtcgttccgcctcccgggcgccgacggcgacccgccgcggttccgcctggatcgcatcgaggacttcgcggacggcgtcctgtcgccgtcgctccacccgggcgccgcgcgggagctggacgcgctccggatgcgcctggacgaggacgcggtgaccaccaacttccagaggtggatccgccgcgccctctggcgccgccccgccaccgtcgacctctactacctcccccgccgctccttcagctggccgcccgccgtgcccctgaccccggtcgccgccgtcagccgcctcaagaccctgcgcatcttcgggctccgcccgacggtcgtcttcggcgccgacgagttcccggccctcgaggacctgcacatcgagaggtgctcgtacgcgcacggcaccatcgcctcgcccactctcaagcggctcgccctcgtctccccaatcaacggctgcttcgtccgcgagcagcgcctcacggctccaggcctcacctcgctgcgcctcgtcctcccgtacagccgggaggaaggggttagggtgatcaccgacgcgccgctcacatcgctcgtcgacgcgtcgatcaccatagtcgacaccgatcctggggatccgcggaaccgacgggtgaaccaattcaaggttgacttcttggttgccatcagcaacctgcttggccgcctcaccagcgtcagaaatctcgacctgactgggctcaatgcaacggcactgctggataataaatcccaggaattcccgatgttcccctacttgacaacattgctcctcaacgagtgtgacattggatacaagtaccacgtgttgaggagcatccttcagaacgccccaaatctggagcagcttagactacacaattgcaagtttgtaggtaaatcgaggaggaaggctgggcaaacccagtcgaaggagaaaacttcaaaatgctctagctcaacattgtcttccgcgtgcagcagtttgaagtcagtggaaatcaagcacccgcacggtgaaccttctcatgatcttttacatgaatttctgaaggaaataccacacaatcaatggaggaagagatcgattgatgaggagacaatatcaatcgagctcaatagaaagtag

SEQ ID NO: 172 - protein, 474 aa, Oryza longistaminata
MRRERDATQIPENPMEMEGIPQTAAAAAAEASEPPRKRARVDDDGGGGAGEEEEDRLSELPDCLLEDILAHLGSRQAVQTSVLSRRWRNLWRGVRVVDIDVGSFRLPGADGDPPRFRLDRIEDFADGVLSPSLHPGAARELDALRMRLDEDAVTTNFQRWIRRALWRRPATVDLYYLPRRSFSWPPAVPLTPVAAVSRLKTLRIFGLRPTVVFGADEFPALEDLHIERCSYAHGTIASPTLKRLALVSPINGCFVREQRLTAPGLTSLRLVLPYSREEGVRVITDAPLTSLVDASITIVDTDPGDPRNRRVNQFKVDFLVAISNLLGRLTSVRNLDLTGLNATALLDNKSQEFPMFPYLTTLLLNECDIGYKYHVLRSILQNAPNLEQLRLHNCKFVGKSRRKAGQTQSKEKTSKCSSSTLSSACSSLKSVEIKHPHGEPSHDLLHEFLKEIPHNQWRKRSIDEETISIELNRK

SEQ ID NO: 173 - DNA, 2757 bp, Oryza longistaminata
  CDS (1)..(2757): homologue/similar gene in O. sativa: Xa21_Os04g0491100
atgcttgtccatagaagcattgagaaagatgtatttgagccacttgtgatgcgtatttctgaaattgcgcaacactattttgggacagtgggctcatctgaaactggtgagaagggtcctacagtgcctgaatttccagagaagatcaaatgggaagtgcaacatctcgaagaattgtttgagggcattaaagaagacaaggaggaggtctatgagggttttaagtctgttagccttgcaatctccgagtggcagagaagattggctatagcataccaaaatgcagctagagatcctcaaccttttgagggaatgaaatgggcaatggagtatcatgagatgtgggttgaagacaataatataataggagctggtgatgagatattggattttgatgaacatgagctttttgaatcacttagatatgtcaagactgcacaaggtggttcagaagctcatctcctggaaagtatcaagagtgggatgcagtgcataaagaatgtgttagccaccattcgatcaagaaaggaagcagacaacaggagctggtgcattgtggaacaggtcttctccccgctactgaaacttttgaaaactatcaatcatctagtatcagaagcggctgcccgcaacaacaagtctgagaactataagatccttgtcaagatcgatgctgaagtcaactgcttacaggatgcactagatttgattgatagaaataagaatgaggtttatgagaacttcagattaatagaagatctcatactaccattattaacatgccttaaggccacatacaatgatcaatcagaatctttgagcttcctagatgcagtcaaacacggagtgaattacttggaaggtgtacttgacaagattgagcagaagcagcgggatggaaatgataatttccacattgtcaaagcagccttctcaccattgttgacatgcatgtacaccttcaggcgcatctcgttggaaaccttagcccatgaagataaatcagatgcttttattctgttggacaggatcagagatgatttgtcacagctcaaagatgtacttcagatggttcaagagaaagagaacggaatatacagtaactttgatgcaattgaagaacatattgatgagatttatgacggacatatgaatgttgaaggttccttaaaacttaaccagatgggtggtctgcgagacaagctccagttgattcatgaagagataacaaatatacggggaaaggtggatgactctttcaaggtccaggaggtctcatgccatgtcatgcgcatggctgcagcacatgaagcttcatcttctcatcagttgtcagcatcaaataccttctgcattaccatggaaagtgcgcagatgtggcagctcaaagttataattgatgaactagagacaagattgagacactgccttctatgccttgctgtgttcccagtggatgccatcatcaagaagagactgttaattcactggtggattggagaaggttttgtaacttcggtttctgaaggcaagagcttctttaataaattgctgctgtccaatgggttcattacgccagtaaagaaataccactgtgacaaagtccactcgtgcaaggtgcaaccttggatccgtggactactgattgaagctgcaaagagcaaagcatttgttgagctcagttcagatggcagccccaggaatgacttcaccaggacccgccgtgcatgcttgcatgctggaaagatccttacaaacttccatcctgatgttttgacgatttacaatatcaagcaacagtatgtagagttaaacaagacatggttttctgaaaagaaccgtttgaccactttgcagttaggacaatggcaggatgcaagttatgaccctcgggcacatcacgttgagattaacaatgccaagttcctaaagcaggtcaaatcctgcaagcagttgaagtacctgagtttgagaggcatatcaagaattgaggcccttccgaactcaattggaaagctctcaagacttgtcattcttgatctcaaagcgtgccataatctagaggatcttcctaaagaaatagtaaaactagtgaagctggagtacttggacgtttctgattgttacctgctctcaggtatgcctaaaggactaggcaagctttttcaacttgaagttctgaagggatttgttctatcaaacgccaagagcaaagatccatgccatctcaatgaacttgtcatgctaaaaaagttacgaaagctgagcattagaattggttatagcatagatagcggtcagtttgcgaattttggtgagctctgtgctctccggtcgcttacacttatttggggggcacacccaatatctacacacgggagttctccaagtcatgctgctcctcatgcaatgccttgtgttctccccttaggtcttgagaagctggagctccgttgttttccccttgtagaattgcctcactgggttagtcctgaaaagctgagaaaattgaagaagctctacatcagcggaggtaacatcagtgacctgggtgatttgaagtcctgggaggtgactgtacttcggctaaggttcctcaaacatatgaactattcatggactgccctgcatgattcattcaggaaactcgatgttttggaggcacatgaatgtgaaaatctacagccctggccttcctgcggaaaagggttatggcggaaagaaccgaatggaacgattgcacctgtgttgacctga

SEQ ID NO: 174 - protein, 918 aa, Oryza longistaminata
MLVHRSIEKDVFEPLVMRISEIAQHYFGTVGSSETGEKGPTVPEFPEKIKWEVQHLEELFEGIKEDKEEVYEGFKSVSLAISEWQRRLAIAYQNAARDPQPFEGMKWAMEYHEMWVEDNNIIGAGDEILDFDEHELFESLRYVKTAQGGSEAHLLESIKSGMQCIKNVLATIRSRKEADNRSWCIVEQVFSPLLKLLKTINHLVSEAAARNNKSENYKILVKIDAEVNCLQDALDLIDRNKNEVYENFRLIEDLILPLLTCLKATYNDQSESLSFLDAVKHGVNYLEGVLDKIEQKQRDGNDNFHIVKAAFSPLLTCMYTFRRISLETLAHEDKSDAFILLDRIRDDLSQLKDVLQMVQEKENGIYSNFDAIEEHIDEIYDGHMNVEGSLKLNQMGGLRDKLQLIHEEITNIRGKVDDSFKVQEVSCHVMRMAAAHEASSSHQLSASNTFCITMESAQMWQLKVIIDELETRLRHCLLCLAVFPVDAIIKKRLLIHWWIGEGFVTSVSEGKSFFNKLLLSNGFITPVKKYHCDKVHSCKVQPWIRGLLIEAAKSKAFVELSSDGSPRNDFTRTRRACLHAGKILTNFHPDVLTIYNIKQQYVELNKTWFSEKNRLTTLQLGQWQDASYDPRAHHVEINNAKFLKQVKSCKQLKYLSLRGISRIEALPNSIGKLSRLVILDLKACHNLEDLPKEIVKLVKLEYLDVSDCYLLSGMPKGLGKLFQLEVLKGFVLSNAKSKDPCHLNELVMLKKLRKLSIRIGYSIDSGQFANFGELCALRSLTLIWGAHPISTHGSSPSHAAPHAMPCVLPLGLEKLELRCFPLVELPHWVSPEKLRKLKKLYISGGNISDLGDLKSWEVTVLRLRFLKHMNYSWTALHDSFRKLDVLEAHECENLQPWPSCGKGLWRKEPNGTIAPVLT

SEQ ID NO: 175 - DNA, 1497 bp, Oryza longistaminata
  CDS (1)..(1497): homologue/similar gene in O. sativa: Xa21_Os04g0509600
atggcgacgtgcgcggcggacctggcgccgctgctggggccggtggcggcgaacgcgacggactacctgtgcaaccggttcgccgacacgacgtcggcggtggacgcgacgtacctgctcttctcggcgtacctcgtgttcgccatgcagctcgggttcgcgatgctctgcgccgggtcggtgcgggccaagaacacgatgaacatcatgctcaccaacgtgctcgacgccgcggccggggcgctcttctactacctcttcggcttcgccttcgccttcggcacgccgtccaacggcttcatcgggaagcagttcttcggcctcaagcacatgccgcagaccgggttcgactacgacttcttcctcttccagtgggccttcgccatcgccgccgccgggatcacgtcgggctccatcgccgagaggacgcagttcgtcgcctacctcatctactccgccttcctcaccgggttcgtctacccggtggtgtcccactggatctggtccgccgatgggtgggcctctgcctcccgcacgtccggacctctgctgttcggctccggtgtcatcgacttcgccggctccggcgtcgtccacatggtcggcggtgtcgccgggctctggggcgctctcatcgagggaccccgcatcgggaggttcgaccacgccggccgatcggtggcgctcaagggccacagcgcgtcgctcgtcgtgctcggcaccttcctgctgtggttcggctggtacggattcaaccccgggtcgttcaccaccatcctcaagacgtacggccccgccggcggcatcaacgggcagtggtccggcgttggccgcaccgccgtgacgacgaccctggccggcagcgtggcggcgctcaccacgctgttcgggaagcggctccagacggggcactggaacgtggtcgacgtctgcaacggcctcctcggcgggttcgccgccatcaccgccgggtgcagcgtcgtcgacccgtgggccgcgatcatctgcgggttcgtctcggcgtgggtgctcatcggcctcaacgcgctcgccgcgcgcctcaagttcgacgacccgctcgaggccgcccagctccacggcgggtgcggcgcgtgggggatcctcttcaccgcgctcttcgcgaggcagaagtacgtcgaggagatctacggcgccggccggccgtacggcctgttcatgggcggcggcggcaagctgctcgccgctcacgtcatccagatcctggtcatcttcgggtgggtcagctgcaccatggggcctctcttctacgggctcaagaagctcggcctgctccgcatctccgccgaggacgagacgtccgggatggacctgacacggcacggcgggttcgcgtacgtctaccacgacgaggacgagcacgacaagtctggggttggtgggttcatgctccggtccgcgcagacccgcgtcgagccggcggcggcggctgcctccaacagcaacaaccaagtgtaa

SEQ ID NO: 176 - protein, 498 aa, Oryza longistaminata
MATCAADLAPLLGPVAANATDYLCNRFADTTSAVDATYLLFSAYLVFAMQLGFAMLCAGSVRAKNTMNIMLTNVLDAAAGALFYYLFGFAFAFGTPSNGFIGKQFFGLKHMPQTGFDYDFFLFQWAFAIAAAGITSGSIAERTQFVAYLIYSAFLTGFVYPVVSHWIWSADGWASASRTSGPLLFGSGVIDFAGSGVVHMVGGVAGLWGALIEGPRIGRFDHAGRSVALKGHSASLVVLGTFLLWFGWYGFNPGSFTTILKTYGPAGGINGQWSGVGRTAVTTTLAGSVAALTTLFGKRLQTGHWNVVDVCNGLLGGFAAITAGCSVVDPWAAIICGFVSAWVLIGLNALAARLKFDDPLEAAQLHGGCGAWGILFTALFARQKYVEEIYGAGRPYGLFMGGGGKLLAAHVIQILVIFGWVSCTMGPLFYGLKKLGLLRISAEDETSGMDLTRHGGFAYVYHDEDEHDKSGVGGFMLRSAQTRVEPAAAAASNSNNQV

SEQ ID NO: 177 - DNA, 2727 bp, Oryza longistaminata
  CDS (1)..(2727): homologue/similar gene in O. sativa: Xa21_OsI_16631
atggccgacgccatctcatgcctgcagccgttgtgcgagtgcttggatggcaccggcctgttcgatgctgcagctagggatgtcgcctctttccttcggctcaaatcgaattggggtgatcttgacaaggccagggagagcctgggggctgttgagaggatggttcgagggcgggtaactgcggagttaaacaagctgaacgtctgtgatcctcaggtggagctgtggctgaggcgtgtcgatgagctgaagctgggtgccattgatgaggactatagcagtttgatgaattactctagcatttgccagtgcaccaggcatgctgctcggcgttcatggattggcaagcgtatcgttgaggcgctggatgaggtgaataaactgatcgaggaagggaggcagtttaagaagtttggattcaagccctcaccggagattgtcgagcgcttgcctcaaaccaagacatttggattggagaccatgctggttcagctgcatgatctgcttgagaaggctgactcaaacataattggtatttggggtcaagggggtattggtaaaacgacactactacatgccttcaacaatgatcttgagaagaaggtccataactaccaggttgttatatttattgaagtatccaattcagagacacttgacacattggagatgcagaagaccatctccgaacgtcttaatttaccatggaatgaagcagagacgactgtgaaacgggccagattccttgttaaggccttgtccaggaaaagatttgtactgcttcttgatgatgtaaggaagaaattccgactagaggatgttggtatcccaactccagacaccaacagccaaagcaagctgatcctaacttcacgtttccaagaactaagcaccgaggcttgtgcagcagttgaatcacctagtcccagcaatgttgttagggatcatgccatagcaatagctcaaagttgtggaggtctaccacttgcgctcaatgtcattgggactgctgtggcaggctatgaagaaccaagagattggaattcagctgctgatgcaatcaaagagaatatgaagtttgaaggtgttgatgaaatgtttgctacgctgaaatacagcttcgacaggctcacacctactcagcaacagtgctttctgtattgcactctttttccagagtatggatcaattagtaaagagcaacttgttgattattggttggctgaaggtttgctacttgatgatcgcgagaagggtaatcagataatccgaagtcttatttcagcatgcttgttgcagaccactagttcaatgtcatcaaaggtgaaaatgcaccacataatcagacatttggggctttggttggttaacagggaagatagaagttttgttgttaaagcagggatggccttagataatgctccaccagcaatagaatggaaagaagctacaaggatctccattatgtctaataacatcacagagctttctttctcaccaaaatgcgaaaacctcaccacactgttaatccagaataacccaaagttgaacaagctaggctggggttttttcaaatatatgcgatccttgaaagtgctagatctatcacacactgcaattacttccattccagaatgtgatacattagttgcattgcagcatctcgacctgtcatacacacatattatgagattacctgagcgcctatggttattgaaagagttgaggcatctggacctcagtgtgactgttgcacttgaagatactttgaacaactgctcaaagttacacaagttgagagtgctgaatcttttccgcagccattacgggattcgtgatgttgatgacctgaatctggattcactgaggtatctattgtttcttggtatcactatttattcacaagacgtgcttaagaaattgaacgagacccatcctttggcaaaatcaacgcatcgcttgaacctgaagtattgtggagatatgcaatcaatcaaaatttctgactttaaccatatgaagcaccttgaggagatgcatgtcgaatcatgctatgacctgaatacactggttgccgatactgagttgacgacttcttgcctacaagcactgaccctctccgtccttccctcattagaaaatgtccttgttgcaccaatgccccataattttcggtacgttcgcaaattgtccatttcacaatgccccaagttgttgaacatcacatgggtccgaagacttgaactgcttgagaggcttgtcatatccaattgtgatgagatgctgactattgttgaagaagctaacagtactgaagagcagcaatatggagcacaaacaataaaaatgcagggttattattctgaagaacaagacgatcatgcaatggctgagagttcacgcaatgagtggaatgatgattaccaaagcgtcaatagagaatcaaccaatggcgcaacgaggcaacctgacttcccaaagttgagatcaattgtgctgactgatgtgaagaagctgagaagcatttgcacgccaagagtttttccctgccttgagactcttcgagtggaagactgcccaaatttgagacgcatcccactgtgcagcactcacaactgtggtaaactgaagcaaatttgtggttcatctgattggtggaagaaactgcagtgggaggacaaggaggcggcggcacatatggagagcaagtacttcattccaatctga

SEQ ID NO: 178 - protein, 908 aa, Oryza longistaminata
MADAISCLQPLCECLDGTGLFDAAARDVASFLRLKSNWGDLDKARESLGAVERMVRGRVTAELNKLNVCDPQVELWLRRVDELKLGAIDEDYSSLMNYSSICQCTRHAARRSWIGKRIVEALDEVNKLIEEGRQFKKFGFKPSPEIVERLPQTKTFGLETMLVQLHDLLEKADSNIIGIWGQGGIGKTTLLHAFNNDLEKKVHNYQVVIFIEVSNSETLDTLEMQKTISERLNLPWNEAETTVKRARFLVKALSRKRFVLLLDDVRKKFRLEDVGIPTPDTNSQSKLILTSRFQELSTEACAAVESPSPSNVVRDHAIAIAQSCGGLPLALNVIGTAVAGYEEPRDWNSAADAIKENMKFEGVDEMFATLKYSFDRLTPTQQQCFLYCTLFPEYGSISKEQLVDYWLAEGLLLDDREKGNQIIRSLISACLLQTTSSMSSKVKMHHIIRHLGLWLVNREDRSFVVKAGMALDNAPPAIEWKEATRISIMSNNITELSFSPKCENLTTLLIQNNPKLNKLGWGFFKYMRSLKVLDLSHTAITSIPECDTLVALQHLDLSYTHIMRLPERLWLLKELRHLDLSVTVALEDTLNNCSKLHKLRVLNLFRSHYGIRDVDDLNLDSLRYLLFLGITIYSQDVLKKLNETHPLAKSTHRLNLKYCGDMQSIKISDFNHMKHLEEMHVESCYDLNTLVADTELTTSCLQALTLSVLPSLENVLVAPMPHNFRYVRKLSISQCPKLLNITWVRRLELLERLVISNCDEMLTIVEEANSTEEQQYGAQTIKMQGYYSEEQDDHAMAESSRNEWNDDYQSVNRESTNGATRQPDFPKLRSIVLTDVKKLRSICTPRVFPCLETLRVEDCPNLRRIPLCSTHNCGKLKQICGSSDWWKKLQWEDKEAAAHMESKYFIPI

SEQ ID NO: 179 - DNA, 471 bp, Oryza longistaminata
  CDS (1)..(471): homologue/similar gene in O. sativa: Xa21_Os04g0521700
atggagctcgacctcccgccgaagcaacgaggcccgccgctcgccgacctcgccgttgccatccaccgggccgccgaggccaccgccgcgctctccgcaccctcctcctcttcccaagccaccgctgctgtggccgccctccgtgacgcccattccgctataggcggcttcctctctcgcctcgaggcctccgtccctgccccttcttcgtccagcgacgatcagccgatggcggacggctgcgaggaggagggggagggggagcagcagatggtagaggaggtggaggagggtctccgggagtgcgccctgcagggtagcaagcggcggaagcggcctgtgccgccgtcgtggcccctagggcgccgctcgagtggcggttgcgtggtgccggaggccgcgccggctcctctggacgtggaggggcggcggcgcgctgccatggatctcttgctacagttccatgggtag

SEQ ID NO: 180 - protein, 156 aa, Oryza longistaminata
MELDLPPKQRGPPLADLAVAIHRAAEATAALSAPSSSSQATAAVAALRDAHSAIGGFLSRLEASVPAPSSSSDDQPMADGCEEEGEGEQQMVEEVEEGLRECALQGSKRRKRPVPPSWPLGRRSSGGCVVPEAAPAPLDVEGRRRAAMDLLLQFHG

SEQ ID NO: 181 - DNA, 1410 bp, Oryza longistaminata
  CDS (1)..(1410): homologue/similar gene in O. sativa: Xa21_Os04g0556400
atggagccggtggccgtcgtggcggtgccgttcccggcgcagggccacctcaaccagctcctgcacctgtcgctgcagctcgcctcgcgcggcggggtggacgtgcactacgcggcgcccgcggcgcacgtccgccaggcccgcgcgcgggtgcagggctgggacgacgcggcgctccgctccgtccggttccacgacctcggcatctccacgtacgcctccccgccccccgaccccgccgccgcctcgcccttcccctcccacctcatgcccctctgggaggcgtacaccgccggcgcgcccgccccgctcgcggctctcctcggcaagctctccgcctcctaccgccgcgtcgtcgtcgtgtacgaccgcatcaacgacttcgctgcacaggaggcggcgcggctgcgcaacggcgaggcgttcgtcatgtactgcctggccgtgtcgatgctcgctaggaggattgctccccaggagcaccaacggatcctgcgcgagaacggcctcaccaacatcaccgtggaggactgtgcaacggaggagttcgtggattacatcagacggacgagggcgaccaaggagatgtcgcctgccagaggtatcctgaccaacacgtgtcgcgcgctcgagggcgagttcgtcgacgccgtcgcggggaacctggccgccgacggcaagaaagttttcaccgtcggaccgttgaacccactgctgcatgcacgcgaacgcgtggaagcagggcgaccagcggcgcagcgccacgagtgcctggactggctcgacaagcagcccccggcgtcagtgctgtacgtctccttcggcacgacatcgtcgctgcgcgcggagcaaatcgaagagctcgcatcggcgctgcgcggcagcaatcagcggttcatctgggtgctgcgcgacgccgaccgcggcgacatattcgcggactccggcgagatcatcagccgccacgcgaagctgctgcgcgagttcacgcagcacaccgaagggagtacggggctggtgatcaccgggtgggcgccgcagctggagatcctcgcgcacggcgccacggcggcgttcatgagccactgcggctggaactccaccatggagagcctgagccacgggaagccgattcttgcctggcccatgcactgcgaccagccatgggacgccgagctcctctgcaagtacctcaaggccggcgtcctcgtgcggccatgggagaagcacaacgagatcacgctggcgaaggacatccaggaagccatcgaggaggccatgctttctgacggaggagtagccatgcgacaacgtgcacgggagctcggagatgccatccgttcctccgtggccgccgccggctcgtcgcgcaaagacctggatgacttcgttgcttacatcacgaggtaa

SEQ ID NO: 182 - protein, 469 aa, Oryza longistaminata
MEPVAVVAVPFPAQGHLNQLLHLSLQLASRGGVDVHYAAPAAHVRQARARVQGWDDAALRSVRFHDLGISTYASPPPDPAAASPFPSHLMPLWEAYTAGAPAPLAALLGKLSASYRRVVVVYDRINDFAAQEAARLRNGEAFVMYCLAVSMLARRIAPQEHQRILRENGLTNITVEDCATEEFVDYIRRTRATKEMSPARGILTNTCRALEGEFVDAVAGNLAADGKKVFTVGPLNPLLHARERVEAGRPAAQRHECLDWLDKQPPASVLYVSFGTTSSLRAEQIEELASALRGSNQRFIWVLRDADRGDIFADSGEIISRHAKLLREFTQHTEGSTGLVITGWAPQLEILAHGATAAFMSHCGWNSTMESLSHGKPILAWPMHCDQPWDAELLCKYLKAGVLVRPWEKHNEITLAKDIQEAIEEAMLSDGGVAMRQRARELGDAIRSSVAAAGSSRKDLDDFVAYITR

SEQ ID NO: 183 - DNA, 1683 bp, Oryza longistaminata
  CDS (1)..(1683): homologue/similar gene in O. sativa: Xa21_Os04g0571600
atgacgacctgcgcggatgaccagacgggctgcgccttcttcgcccccttgctgtcctccaagggggcggaggtcgtcatcttggtggccggcgatgaggcggaggagcagcagccggcgccggtgctgacgagcaagccgccgggtcggctcgccaaggcggtgaacgaagcctggtccgtttctttgggcgtcgcgttcccggtgacgccgtccatgttcacctgctcggcacggggcgaggcgcggtccattcttggcctcgcattcccgatgatactgacgggtttgctgctctatctccggtcgatgatctcgatgctattccttggtcacctcggcgggctggccctcgccggcgggtccctcgccatcggattcgccaatattaccggctactctgtcctctccggcctcgccatgggcatggagccgatatgcggtcaggccttcggcgcgggcaattacgcgctcctgggcgtcaccatgcagcggacggtgctcctcctcatcgcggccgccatccccataggtggcctgtgggtgcagatgcggcctctcctcctcttctgtggccaggacgccgccatcgcggcggtcgccgagacctacattttcgcgtctctccctgacctcgttctccaggcattcctccacccggtgaggatatacctcaggacgcaatccatcaacctgcccctcaccgtgtgcgccggcctggccattgccatccacctccccatcaactacgttctcgtagtcgtcctcggcctcggcgtaaagggggtcgcattggcgtccgtgctggccaacttgaacctcgtgctcttcctcctcgcctacatcttcttgaaaggcgtccacaagcgcaccggcggtttccttctgtccgccgagagcttccgtggctggggcgagctcatcagcctcgcgctgccgagctgcgtgagcgtctgcctcgagtggtggtggtacgagatcatgatcctgctgtgcggcctgctgctgaacccgcaggcgacggtggcgtccatgggcatactgatccagaccacgtcgctcatatacatcttcccttcgtcgctcagcttcggcgtgtccacccgcgtgagcaacgagctaggcgcggggcagcccgaggaggcgagccgcgcagccacggtggggctcgtgctcggcttcgggttcggcgccttcgcctccgcgttcgcgttcctcgtgcgcaacgtgtgggcgagcatgttcacggccgacccggccatcgtcgcgctcaccgcgtccgtgctgcccatcctgggcttgtgcgagctcggcaactgcccgcagacgacggggtgcggggtgctgcgcggcagcgcgcggcccaaggacgccgcgagcatcaacctccgctccttctacctcgtcgggacgcccgtggcgctcgtcatggcgttctggttccacttggacttcaggggcctctggttcggcctgctcgcggcgcaggctacctgcacggtgcgcatgctgctggtcatcggccggacggactgggcggccgaggccaagcggtccaagcagctcaccggagcgggcgccgccaacatggagagtgacgacagagttgccgcggacgagaagttgcgcttacccgtcgacacggacgtggagcgatcgagcgatcacactgatcggtgttga

SEQ ID NO: 184 - protein, 560 aa, Oryza longistaminata
MTTCADDQTGCAFFAPLLSSKGAEVVILVAGDEAEEQQPAPVLTSKPPGRLAKAVNEAWSVSLGVAFPVTPSMFTCSARGEARSILGLAFPMILTGLLLYLRSMISMLFLGHLGGLALAGGSLAIGFANITGYSVLSGLAMGMEPICGQAFGAGNYALLGVTMQRTVLLLIAAAIPIGGLWVQMRPLLLFCGQDAAIAAVAETYIFASLPDLVLQAFLHPVRIYLRTQSINLPLTVCAGLAIAIHLPINYVLVVVLGLGVKGVALASVLANLNLVLFLLAYIFLKGVHKRTGGFLLSAESFRGWGELISLALPSCVSVCLEWWWYEIMILLCGLLLNPQATVASMGILIQTTSLIYIFPSSLSFGVSTRVSNELGAGQPEEASRAATVGLVLGFGFGAFASAFAFLVRNVWASMFTADPAIVALTASVLPILGLCELGNCPQTTGCGVLRGSARPKDAASINLRSFYLVGTPVALVMAFWFHLDFRGLWFGLLAAQATCTVRMLLVIGRTDWAAEAKRSKQLTGAGAANMESDDRVAADEKLRLPVDTDVERSSDHTDRC

SEQ ID NO: 185 - DNA, 660 bp, Oryza longistaminata
  CDS (1)..(660): homologue/similar gene in O. sativa: Xa21_Os04g0572400
atggagtgggcgtactacggcagtgggtactcctcgtcggggtcgccgtcgccggtgggcggcgacggggacgaggactcgtacatgacggtgtcgtcggcgccgcccaagcggcgggcggggaggaccaagttcaaggagacgaggcacccggtgtacaagggcgtgcgcagcaggaaccccgggaggtgggtctgcgaggtgcgcgagccgcacggcaagcagaggatctggctcggcaccttcgagaccgccgagatggcggcgcgcgcgcacgacgtcgcggcgatggcgctgcgcggccgcgccgcctgcctcaacttcgccgactcgccgcgcaggctccgcgtgccgccgctgggggccgggcacgaggagatacgccgcgccgcggtcgaggccgccgagctgttccgcccggcgcccgggcagcacaatgcggccgccgaggcggcggccgctgtcgctgcgcaggcaaccgcggcgagcgcggagctctttgccgatttcccttgctacccgatggacggactggaattcgaaatgcaggggtacctcgacatggcacagggaatgctcatcgagccgccgccagtgacagggcaatcgacgtgggcagaggaggactacgactgcgaggtcaatctatggagctactga

SEQ ID NO: 186 - protein, 219 aa, Oryza longistaminata
MEWAYYGSGYSSSGSPSPVGGDGDEDSYMTVSSAPPKRRAGRTKFKETRHPVYKGVRSRNPGRWVCEVREPHGKQRIWLGTFETAEMAARAHDVAAMALRGRAACLNFADSPRRLRVPPLGAGHEEIRRAAVEAAELFRPAPGQHNAAAEAAAAVAAQATAASAELFADFPCYPMDGLEFEMQGYLDMAQGMLIEPPPVTGQSTWAEEDYDCEVNLWSY

SEQ ID NO: 187 - DNA, 1555 bp, Oryza longistaminata
  CDS (1)..(1554): homologue/similar gene in O. sativa: Xa21_Os04g0584600
atgggcaacgcatgcggcggttcccttagatccaagtacctgagcttcaagcagaccgcgtcgcagcgccacgacaccgacgtcgacaacaacaacgccgccgcggccgactcgccgaagaagccctcccgccctccagcagccgccaagacggacctctacgccatgggcaggaagctcgggcaggggcagttcggcaccacctacctctgcaccgagctgtccactggggtggactacgcctgcaagtccatttccaagcgcaagctcatcaccaaggaggacatcgaagacgttcgccgcgagatccagatcatgcaccatctctcgggccacaagaacgtcgtcgccatcaagggcgcctacgaggaccagctatacgtgcacatcgtcatggagctctgcgccggcggcgagctcttcgatcgcatcatacagcgcggccactacagcgagcggaaggccgccgagctcacgcggatcatcgttggggtcgtcgaggcctgccactcgctcggggtcatgcaccgggacctcaagccagaaaacttcctgcttgccaacaaggacgatgacctctcgctcaaggccatagattttggtctctcagtcttcttcaagcccggtcaaacttttaccgatgttgtcggaagcccatattacgtagctccagaagtgttgttgaaacactatggaccagaagctgatgtatggactgcaggtgtcattctctacattttactaagtggtgtacctccattctgggcagagacacaacaaggaatatttgatgctgtactaaaaggcttcattgattttgattctgatccttggcctgtgatctctgatagtgcaaaggatcttataacaaaaatgctcaatcctcgcccaaaggaacgcttaacagcacatgaagttctatgccatccatggattcgtgatcacggagttgctccagatcggcctcttgatccagctgtcctatctcgcatcaagcagttctctgcaatgaataagttgaagaagatggctttgcgggtaatagctgagagtctctcagaggaggaaatcgctgggttgaaggaaatgtttcagactatggatgctgataacagtggtgcgatcacatatgatgagcttaaagaaggcttgagaaaatatggctcaacacttaaggacaccgagattcgtgatcttatggatgcagcagatatagacaacagcggaacaattgattatatcgaattcattgctgcaacattgcatctcaataaactggagcgagaggaacatcttgtggcagctttttcatattttgacaaagatggaagtggttacatcacagtggatgaactgcagcaagcttgcaaagagcataacatgcccgatgcttttcttgatgatgtcatcaatgaagctgatcaggacaatgatgggcgcattgactatggagaatttgttgccatgatgaccaagggcaatatgggagtcggacgaagaacaatgagaaacagcttgaatatcagcatgagggacgcacctggtgcactctaag

SEQ ID NO: 188 - protein, 517 aa, Oryza longistaminata
MGNACGGSLRSKYLSFKQTASQRHDTDVDNNNAAAADSPKKPSRPPAAAKTDLYAMGRKLGQGQFGTTYLCTELSTGVDYACKSISKRKLITKEDIEDVRREIQIMHHLSGHKNVVAIKGAYEDQLYVHIVMELCAGGELFDRIIQRGHYSERKAAELTRIIVGVVEACHSLGVMHRDLKPENFLLANKDDDLSLKAIDFGLSVFFKPGQTFTDVVGSPYYVAPEVLLKHYGPEADVWTAGVILYILLSGVPPFWAETQQGIFDAVLKGFIDFDSDPWPVISDSAKDLITKMLNPRPKERLTAHEVLCHPWIRDHGVAPDRPLDPAVLSRIKQFSAMNKLKKMALRVIAESLSEEEIAGLKEMFQTMDADNSGAITYDELKEGLRKYGSTLKDTEIRDLMDAADIDNSGTIDYIEFIAATLHLNKLEREEHLVAAFSYFDKDGSGYITVDELQQACKEHNMPDAFLDDVINEADQDNDGRIDYGEFVAMMTKGNMGVGRRTMRNSLNISMRDAPGAL

SEQ ID NO: 189 - DNA, 669 bp, Oryza longistaminata
  CDS (1)..(669): homologue/similar gene in O. sativa: Xa21_Os04g0610400
atggctcccaggaacgccgccgaggccgtcgccgtcgccgtggcggagggcggaggggccggcatggagcccaggttccgcggcgtgaggaagcgcccgtggggcaggtacgcggcggagatccgcgacccggcgaggaaggcgcgggtgtggctcggcaccttcgacaccgccgaggccgcggcgcgcgcctacgacagcgccgcgctccacttccgcgggcccaaggccaagaccaacttccccgtcgccttcgcgcacgcccaccaccacgccccgccgccgccgctgcccaaggcggcggcgctggccgtcgtcagcccgaccagcagcacggtcgagtcgtcctcccgggacacgcccgccgccgcgccggtggtggccgcggccaaggcccaggtgcccgccgcgccctcgctcgatctgagcctcgggatgtcggccatggtggccgcacagccgttcctgttcctcgacccaagggtcgcggtgaccgtggccgtcgcggcgccggtgcctcgccggccggccgtcgtcagcgtcaagaaggaggtagctcgcctggacgagcagagcgacaccggctcgtcgtcatccgtggtggacgcctcgccggccgtcggcgtggggctcgacctgaacctgccgccgccgaccgaggaggcgtag

SEQ ID NO: 190 - protein, 222 aa, Oryza longistaminata
MAPRNAAEAVAVAVAEGGGAGMEPRFRGVRKRPWGRYAAEIRDPARKARVWLGTFDTAEAAARAYDSAALHFRGPKAKTNFPVAFAHAHHHAPPPPLPKAAALAVVSPTSSTVESSSRDTPAAAPVVAAAKAQVPAAPSLDLSLGMSAMVAAQPFLFLDPRVAVTVAVAAPVPRRPAVVSVKKEVARLDEQSDTGSSSSVVDASPAVGVGLDLNLPPPTEEA

SEQ ID NO: 191 - DNA, 261 bp, Oryza longistaminata
  CDS (1)..(261): homologue/similar gene in O. sativa: Xa21_Os04g0635100
atggcgggtgcagcgaaggcgtcgtggatggtggcgatgagcgtgggcgccgtggaggcgctcaaggaccagggcggactctgccgctggaactacgcgctgcggtccatccacaaagcagccaaggccaacgccgccggcgtctcgcagggcaagaagctgcctgcttctgcggcggcagtggcggagaggaggagagcggagaaagccgaggaggggttgaggacagtcatgtacctcagctgctggggtcccaattag

SEQ ID NO: 192 - protein, 86 aa, Oryza longistaminata
MAGAAKASWMVAMSVGAVEALKDQGGLCRWNYALRSIHKAAKANAAGVSQGKKLPASAAAVAERRRAEKAEEGLRTVMYLSCWGPN

SEQ ID NO: 193 - DNA, 585 bp, Oryza longistaminata
  CDS (1)..(585): homologue/similar gene in O. sativa: Xa21_Os04g0639200
atggcggcggcggcggcgcgcgcgatcatatgcgagatggcaccgcagaggggggcggcggcggcggcgccgccggcgcagcagcaggcgacgacgagacgagacggtgggaagatcatgctccagccacgcctctgcacgctccggtcgtacggcgccggcagcggcgtggtggcgcggaggcgggtggtggaggaggaggagagcggcggcggcggcgcggggtcctccccgttcttcgcgtcgctcgccgactacatcgagagcacccgcaagagccaggacttcgagaccatctccggccgcctcgccatggtggcgttcgcgacggcggtggcggtggagttgacgacggggaactcgctgttcaagaagctggacatgcaggagatcgaggaggcggccggggtatgcctcgccgtggtcgccggcgccgccgcgttcgcgtgggtgtccagcgcgcgcaccaggatcggccagatgttcacgctgggttgcagcgccttcgtcgactcgctcatcgacaacatcgtcgaagctctcttctccgagggcgagctgcaggactggtccgacgacgtatga

SEQ ID NO: 194 - protein, 194 aa, Oryza longistaminata
MAAAAARAIICEMAPQRGAAAAAPPAQQQATTRRDGGKIMLQPRLCTLRSYGAGSGVVARRRVVEEEESGGGGAGSSPFFASLADYIESTRKSQDFETISGRLAMVAFATAVAVELTTGNSLFKKLDMQEIEEAAGVCLAVVAGAAAFAWVSSARTRIGQMFTLGCSAFVDSLIDNIVEALFSEGELQDWSDDV

SEQ ID NO: 195 - DNA, 618 bp, Oryza longistaminata
  CDS (1)..(618): homologue/similar gene in O. sativa: Xa21_Os04g0685300
atgggttcggcgagccgcgcggtgtcgtgcctgtgctgcccgtgcaagtgcctggcgtgcggcctcttcagctgcctctgcagcatcctcatctccctcctcgtcaccctcggcgtcctcgccctcatcttctacctcatcttccgcccccacatgatcgccgccaccgtcgactccgccgccctcacccagttcaccctctccaccaactccgccctcgcctacagcctcaccgtcgacctcaccgtccgcaaccccaacaagcgcgtcggcctctactacgacaacgtcgagtccctcgccctcttcgacggccagcgcttcggctacgtgcccctcgactccttctaccagtccaccgaggcatccaccaagctctcccccgccttcaagggccagcagccgctccaaggcgacatcaccgccgccaacttcaggacgcagcaggccgccggcaagttcgacatcgaggtcaagctcaacgccaagctcagggtcaaggtctgggccttcaaggttcccggacccaaggccaagatcagctgccccatcaccgtcccagcgtccgcccccaacgcccccgcattccagcgcaccgactgcaaagtatggttctga

SEQ ID NO: 196 - protein, 205 aa, Oryza longistaminata
MGSASRAVSCLCCPCKCLACGLFSCLCSILISLLVTLGVLALIFYLIFRPHMIAATVDSAALTQFTLSTNSALAYSLTVDLTVRNPNKRVGLYYDNVESLALFDGQRFGYVPLDSFYQSTEASTKLSPAFKGQQPLQGDITAANFRTQQAAGKFDIEVKLNAKLRVKVWAFKVPGPKAKISCPITVPASAPNAPAFQRTDCKVWF

SEQ ID NO: 197 - DNA, 2475 bp, Oryza longistaminata
  CDS (1)..(2475): homologue/similar gene in O. sativa: Xa21_OsJ_24689(Os07g0553633)
atggctcctctcttcttcctcctcctcttcagccaaatctttctctgcaccgcggtggacaccatcaactccaccgcgccgctgtccgggacgcagaagatcgtctccaagggcggcaggttcgcccttggattctacaccccgccacaaggtaacaacaccgcctccggcaccggcaactactacatagctatatggtacaacaacataccgttgcagacgacggtgtggacggccaacagcgacgtgccggtgtctgacccgaccaccgcatccttgtccatcggcagcgatggcaatcttgtcctccttgatcaatccaagaacaggcagctgtggtcgaccaacgtaagtgtggcctccaactccaccgttgccgtcatccaggacggcggtagcctcgacctcatggatgccaccaattcatccatagtctactggaggagcatagatcatccgacaaacacctggcttccgggcggcaagctggggctgaacaagaccactggtgtgagccagcggcttgtcccatggaggaacaatgcaaacccgtcccctgggctgttctcccttgagctggatcccaacggcacaacgcagtacttcatccagtggaacgactccatcacttactggaccagcggcccttggaacggtaatatcttcagtcttgtgcccgagatgacggccggttacaactacaacttccggttcattaacaatgtctcggagagctacttcatatactccatgaaggatgactcgatcatctcgcggttcaccattgatgtgaatgggcagatcaagcagtggacatgggtaccagcctcggagaattggatcttgttctggtcccagccacggacgcagtgtgaggtgtacgggctctgcggcgcatatggaagttgcaacctcaatgtcctgccgttctgcaactgcatcaaggggttcagccagaagtttcagagtgattgggacctccaggattttactggtgggtgcaagaggaacgtaccgttgcagtgccagaccaactcaagctctgcacagactcagcctgataagttctattccatggttagtgtgaggctacctgataatgctcagagtgcagtggccgctagttctcaggcctgtcaggttgcttgcctgaataattgctcatgtaatgcttatacttacaatagtagtggctgctttgtttggcacggggacttgattaacctccaagatcaatacaatgggaatggaggaggcacactcttcctcaggcttgcagcgtctgaacttccagactctaaaaatagcaagaaagtgatcattggtgcagttgtaggtggagttgctgcagctttgataatccttgcaattgtgttgttcatcgtattccagaaatgccgccgagacaggactcttcgcatatccaagactactgggggtgcactgattgccttccggtacagtgatctgcagcatgtcaccagcaacttctcagagaagctgggtggaggtgcctttggcacagtatttaaagggaagctcccagattcaacagccattgcagtgaagaggcttgatggactgagccagggggagaagcaattccgtgctgaggtaagcaccatcgggaccatccaacatgtcaatctggttcgcctacttggtttctgctctgaaggatcaagaagactgcttgtctatgagtacatgccaaagggctccctggaattgcagctgttccatggtgagacaacggcactgaactgggccataaggtatcaaattgcacttggaacagcaaggggcctaaattacctgcatgaaaaatgtagggattgcataatacactgtgatgttaagccagataacatacttttggatgagtcatttgtacccaaagtgtctgactttggtctagcaaagctcttagggcgggatttcagccgtgttttgacaacaatgagagggacaaggggttaccttgcgcctgagtggatcagtggtgtgccgattactcctaaggcagatgtcttcagctatggcatgatgctcttcgaactcatatcaggcagaaggaatgctgatctaggggaggagggaaagtcctctttcttcccaactttggctgtaaacaaactacaggaaggtgatgtgcagaccttgttagaccccaggttgaatggagatgccagcgctgatgagctcacaaaagcttgcaaggttgcctgctggtgtatccaagatgatgaaaatgccagacctacaatgggtcaggtcgtccaaattttagagggattccttgatgtcaacatgcctcctgttccaaggtcactgaaggttcttaatgaaagccctgatgtcataaattttttctcagatgtttcatcaagtcaaacttcgcagatgcataatagcacagcttcttcgcagacaaagagttctacttcaggtggttcacaatttcagagctcataa

SEQ ID NO: 198 - protein, 824 aa, Oryza longistaminata
MAPLFFLLLFSQIFLCTAVDTINSTAPLSGTQKIVSKGGRFALGFYTPPQGNNTASGTGNYYIAIWYNNIPLQTTVWTANSDVPVSDPTTASLSIGSDGNLVLLDQSKNRQLWSTNVSVASNSTVAVIQDGGSLDLMDATNSSIVYWRSIDHPTNTWLPGGKLGLNKTTGVSQRLVPWRNNANPSPGLFSLELDPNGTTQYFIQWNDSITYWTSGPWNGNIFSLVPEMTAGYNYNFRFINNVSESYFIYSMKDDSIISRFTIDVNGQIKQWTWVPASENWILFWSQPRTQCEVYGLCGAYGSCNLNVLPFCNCIKGFSQKFQSDWDLQDFTGGCKRNVPLQCQTNSSSAQTQPDKFYSMVSVRLPDNAQSAVAASSQACQVACLNNCSCNAYTYNSSGCFVWHGDLINLQDQYNGNGGGTLFLRLAASELPDSKNSKKVIIGAVVGGVAAALIILAIVLFIVFQKCRRDRTLRISKTTGGALIAFRYSDLQHVTSNFSEKLGGGAFGTVFKGKLPDSTAIAVKRLDGLSQGEKQFRAEVSTIGTIQHVNLVRLLGFCSEGSRRLLVYEYMPKGSLELQLFHGETTALNWAIRYQIALGTARGLNYLHEKCRDCIIHCDVKPDNILLDESFVPKVSDFGLAKLLGRDFSRVLTTMRGTRGYLAPEWISGVPITPKADVFSYGMMLFELISGRRNADLGEEGKSSFFPTLAVNKLQEGDVQTLLDPRLNGDASADELTKACKVACWCIQDDENARPTMGQVVQILEGFLDVNMPPVPRSLKVLNESPDVINFFSDVSSSQTSQMHNSTASSQTKSSTSGGSQFQSS

SEQ ID NO: 199 - DNA, 984 bp, Oryza longistaminata
  CDS (1)..(984): homologue/similar gene in O. sativa: Xa21_Os05g0322900
atgacgtcgtcgatgtcgccggcgccggcgccgccgtacgcgcaggtgatggaggacatggagaaggggaaggagctggcggcgcagctgcaggggctcctccgcgactcgccggaggccggccgcatcgtcgaccagatcctccacaccttctcccgggcgatgcgggcgctcgacaaggcggcggtctccgccgccggaggagaagggtcggaggtgcagagcgaggtcacctgcgggggcggggccagcgccggcgggaagaggaaagcccccgccgccgaccggaaggccaactgccgcaggaggacgcagcaatcgtccgggaatacggtggtcgtcaagaacctcgacgacggccaggcatggcgcaagtacgggcagaaggagatccaaaactccaagcacccaaaggcctacttccggtgcacgcacaagtacgaccagctgtgcacggcgcagcggcaggtgcagcgctgcgacgacgacccggcgagctacagggtcacctacatcggcgagcacacctgccgggacccggccaccgcccccatcatcgcggcgcacgtcatccaccaggtcgccgccggcgacgacgacgacggctgcggcggcctccacgcggggtcccgcctcatcagcttcgtcgccgcgccggcggcgccagtagacgctgccgcggcgccgacgaccagcacgatcaccacggtcaccgcgccgggcccgctgcagcagccgctcaaggtggagggcggcgtcggctcgtccgaccaggaggaggtgctgagcagcctcacgcccggcagctccgcggtgcgcggcggcggcgggggcgcgggtcccttcgggccggaccagggcgatgtcacgtcctcgctgcactgcagctacgacgccgacgccttcgccgtcgccggcatggagttcttcaaggacgacgaggttgtcttcaatctggacgacattatgggtttgagcttttga

SEQ ID NO: 200 - protein, 327 aa, Oryza longistaminata
MTSSMSPAPAPPYAQVMEDMEKGKELAAQLQGLLRDSPEAGRIVDQILHTFSRAMRALDKAAVSAAGGEGSEVQSEVTCGGGASAGGKRKAPAADRKANCRRRTQQSSGNTVVVKNLDDGQAWRKYGQKEIQNSKHPKAYFRCTHKYDQLCTAQRQVQRCDDDPASYRVTYIGEHTCRDPATAPIIAAHVIHQVAAGDDDDGCGGLHAGSRLISFVAAPAAPVDAAAAPTTSTITTVTAPGPLQQPLKVEGGVGSSDQEEVLSSLTPGSSAVRGGGGGAGPFGPDQGDVTSSLHCSYDADAFAVAGMEFFKDDEVVFNLDDIMGLSF

SEQ ID NO: 201 - DNA, 1656 bp, Oryza longistaminata
  CDS (1)..(1656): homologue/similar gene in O. sativa: Xa21_OsI_19719(Os05g0373300)
atgggcgggtgcttgtccggcgacgtgcgcggcggcatggaggccgtgggcgggagcggtggccgcggggcggcggggaccggaggaggagggggaggagtggcggggcagggcggcggggcgaacgaggcggtggaccacttcttcaacgccgccggcctccgcggcctctactcgcctctcgagctatccttttcagcatcaaagttgaggaatatggatgctttttccaagagtgatccaatgttagtgatctacataagaaaggacacaaggctagaagagattggccgtactgaagtgatactgaactctctggaaccctcgtggatcacaaaggctacaataagttaccaatttgagattatacagccgcttgtattcaagatatatgacattgacacaaggtaccataacacgccagtcaagacgctgaacttggctcagcaagattttcttggagaagcatgctgcaatttgtcagagattgtcacaaacaatcacagcctgacacttaacctcagagatagttgtggacatgcccttctaggaacagtgacagtacatgctgaagaaagtaattcgtcaaggatggcagttgagatgacactccatgccctaaacttggaaaacaaagatgtattttccaaaagtgataacccattgctagttgagtgttttgattttgattcaagtggtgaccacgaacttattggggccttccagacaactatcactcaacttgagaatctatataattcaaagtctggagcaaactttttcagccataagggacagaaaaagttgaagggacaattgtttgtggataagttccaggaaaaagttcaacatactttcttggactacatttccagtggttttgagctaaattttatggtggctgtagatttcacggcttcaaatggtgacccccgttcacctcagtctttgcactacattgacccctctggcagaccgaactcataccagcaggcaatactaggggttggcgaagttctgcagttttatgacaatgataggcgattcccggcatggggttttggagcgaagacaccacagggctacatatcccactgttttaatctgaatgcaactaccaatgattgcgaggtcgtcggagttgaaggcatcatgtcagcatacacctctaccctttacagtgtcacccttgctgggccaactctgtttgggccaattatcaacaaagctgccgagattgccagccactcccttcaatacggaaacaacaaatactttgtcctactcatcatcacggatggagttctcactgacattcaagaaacaaaagattctatcgtgagggcatctgatctgccattgtcaatcctcatcgtgggcgttggaaatgctgatttcaagcaaatggagatcctggatggagataacggcaagcggctggagagctcgaccggcaggatcgcgacgcgggacatcgtccagttcgtccccatgagggatgtccaaggcgggcagatctccgtcgtccagtcgctgctggaggagctcccgggccagttcctggcctacatgcgcagccgggacatcaagccgcgagccccgctgcagcacgacaacgcctcttccgctccgcccctttaccctccaaccaagtga

SEQ ID NO: 202 - protein, 551 aa, Oryza longistaminata
MGGCLSGDVRGGMEAVGGSGGRGAAGTGGGGGGVAGQGGGANEAVDHFFNAAGLRGLYSPLELSFSASKLRNMDAFSKSDPMLVIYIRKDTRLEEIGRTEVILNSLEPSWITKATISYQFEIIQPLVFKIYDIDTRYHNTPVKTLNLAQQDFLGEACCNLSEIVTNNHSLTLNLRDSCGHALLGTVTVHAEESNSSRMAVEMTLHALNLENKDVFSKSDNPLLVECFDFDSSGDHELIGAFQTTITQLENLYNSKSGANFFSHKGQKKLKGQLFVDKFQEKVQHTFLDYISSGFELNFMVAVDFTASNGDPRSPQSLHYIDPSGRPNSYQQAILGVGEVLQFYDNDRRFPAWGFGAKTPQGYISHCFNLNATTNDCEVVGVEGIMSAYTSTLYSVTLAGPTLFGPIINKAAEIASHSLQYGNNKYFVLLIITDGVLTDIQETKDSIVRASDLPLSILIVGVGNADFKQMEILDGDNGKRLESSTGRIATRDIVQFVPMRDVQGGQISVVQSLLEELPGQFLAYMRSRDIKPRAPLQHDNASSAPPLYPPTK

SEQ ID NO: 203 - DNA, 498 bp, Oryza longistaminata
  CDS (1)..(498): homologue/similar gene in O. sativa: Xa21_Os05g0453700
atggccggtggcggcagggccgatgacgagcgaaggatcggggtggcgatggactactcggcgagcagcaagagggcgctggactgggccatcgccaacctgctccgccggggcgaccacctcgtcgtcctccacgtcctgcatcacggcggggaggaggccaagcacgccctgtggggcaagtccggatccccgctgatccctctctccgagttccgggatccgacggcgatgcagcagtacggcgtgcactgcgacgccgaggtgctcgacatgctcgacacggcggcgcgccagttggagcttaccgtagtggcgaagctgtactggggcgacgccagggagaagctctgcgacgccgtcgaggagcagaagatcgacacgctcgtcatgggcagccgcggcctcggctcgatccagaggattcttctggggagtgtgacaaactacgtgctgtcaaacgcatcatgccctgtaacagtcgtcaaggggaagtga

SEQ ID NO: 204 - protein, 165 aa, Oryza longistaminata
MAGGGRADDERRIGVAMDYSASSKRALDWAIANLLRRGDHLVVLHVLHHGGEEAKHALWGKSGSPLIPLSEFRDPTAMQQYGVHCDAEVLDMLDTAARQLELTVVAKLYWGDAREKLCDAVEEQKIDTLVMGSRGLGSIQRILLGSVTNYVLSNASCPVTVVKGK

SEQ ID NO: 205 - DNA, 1455 bp, Oryza longistaminata
  CDS (1)..(1455): homologue/similar gene in O. sativa: Xa21_OsI_20201
atggaggaggatgggggaggcgcggggaggaggaaggagcgggtggtgctgatgtgggggtacctccccggggtgtcgcagcagcggtcgccgctgctggggccggtgcccgtgaggatgccgggcgcggccgcggcggccggtgatgcgtggagggatgtggccggcggcgggtgcggcttcgcgatggccgtctccgagcaaggaaaactcttcacttggggctctaccgatgatatgggacaaagttacgtgactgctgggaagcatgaggaaactccggaggcatttcctcttcctagtgatattgcaattgtaagggctgacgctggatgggcacattgtgttgcaataacaggtaaaggtgatgtctacacatggggttggaaagaatgcgttccaactggaagggtcattgcagaccattctgcaactggggctatggattgtgataaaaggcaaagtggggttgccactgaccaaggaaactcgattacagtgagccccaggtcaaaggtgtctaggacaaacaccaaggcagcatctggtcctgctgaaagccgaagttctgaggatagcacaaagcgacggaggttatcttcatcgaaacacggggctgaaagtgaatcatctagtgatgaaaatctttcagcaccaccttgtgttgtgacatttaatacaggagtgaagatagcggaagtagctgcaggtggccgtcatacattagtgctgtcagattttggtcaggtctggggttggggctatggtggggaaggacaactaggtttaggctctaggatccggacagtttcctccccacatcccataccttgtgttcaatcggcgttctacagcaaggaccgtacaggaattgtgatgggtagcagaactttggaaggaacaaatgatagagcagcaacttgcgtgaaagcaattgcctgtggaggccgtcatagtgctgtggtgacagattcaggagcacttcttacatttggatggggattatatggacagtgtggacaagggaacacggatgatattttaagcccaacgtgtgtttcggctattatgggagtgaagatacaacgtgtagcagctgggctatggcatactgtatgtacatctgctgatggtgatgtatattcctttggaggtaaccagtttgggcagctgggaactggatcagatcaagctgagattgttccaaagttggtagaagcctcgaaattggaaaataagcatgcaagaggtgtttcgtgtggagcccgacacagtgcagtcataacagataaaggagatgtcttctgctggggttggaacaagtacggtcagcttggtttgggcgactcaacagacagaaacgtaccatgccaagtgcccgtggaagcgtacaacccgctaaacgtttcatgcggttggtggcacacgttggttctcgcggaatatcctacctga

SEQ ID NO: 206 - protein, 484 aa, Oryza longistaminata
MEEDGGGAGRRKERVVLMWGYLPGVSQQRSPLLGPVPVRMPGAAAAAGDAWRDVAGGGCGFAMAVSEQGKLFTWGSTDDMGQSYVTAGKHEETPEAFPLPSDIAIVRADAGWAHCVAITGKGDVYTWGWKECVPTGRVIADHSATGAMDCDKRQSGVATDQGNSITVSPRSKVSRTNTKAASGPAESRSSEDSTKRRRLSSSKHGAESESSSDENLSAPPCVVTFNTGVKIAEVAAGGRHTLVLSDFGQVWGWGYGGEGQLGLGSRIRTVSSPHPIPCVQSAFYSKDRTGIVMGSRTLEGTNDRAATCVKAIACGGRHSAVVTDSGALLTFGWGLYGQCGQGNTDDILSPTCVSAIMGVKIQRVAAGLWHTVCTSADGDVYSFGGNQFGQLGTGSDQAEIVPKLVEASKLENKHARGVSCGARHSAVITDKGDVFCWGWNKYGQLGLGDSTDRNVPCQVPVEAYNPLNVSCGWWHTLVLAEYPT

SEQ ID NO: 207 - DNA, 1398 bp, Oryza longistaminata
  CDS (1)..(1398): homologue/similar gene in O. sativa: Xa21_OsJ_19053(Os05g0495700)
atggtggggagctacgcggcgggaggggggcggggcgcggcggtggcggcggtggcggaggggaagctggacgagcttcggcggaggatggggaaggcggacggcgacctgctgaggatcgtcggggtggggggcggggcgtgggggagcgccttctgcgcgctgctgcaggacgcgtacgggcggcaccgcgacaaggcgcaggtgcgggtgtggcggaggcccgggcgcgccgtcgaccgcgccaccgccgagcacctcttcgaggtcatcaactcccgggaggacgtcctccgcaggctcatccgccgctgcgcctacctcaagtacgtcgaggcccgcctcggcgaccgcacgctctacgccgacgagatcctccgcgacggcttctgcctcaacatggtcgacacgccgctctgcccgctcaaggtcgtcaccaacctgcaggaggcggtctgggacgccgacatagtcatcaacggcttgccctccaccgagaccagggaggtgttcggggagatcgggaggtattggaaggagaggatcagaccccccgtgatcatctcgctggccaaggggatcgaggcgtcgatcgaccccgtgccccggatcattaccccgacacagatgatcagcaatgcaactggagttccattggagaacattctatatcttggaggtcctaacattgcatctgagatatataacaaagaatatgcaaatgctcgcatatgtggagctgacaagtggagaaaacctctagctaaatttctgaggcagccccattttattgtgtgggataatagtgatcttatcactcatgaagtaatgggtggcttaaagaacatatatgccattggtgctggtatggtggctgcactaaccaatgagagtgcaaccagcaaatcggtttacttttcactttgcacgtctgaaatgatatacatcacccatctcctagccgaagaccctgagaaacttgctggacctttattagccgatacctatgtaacactgctgaaaggtcgtaatgcatggtatgggcagaagttagctaagggtgagctgactcttgaaatgggggacagtatcaagggcaaagggactatccagggtgtctctgcagtccatgcattttatgagctcttgagccagagtagcttaagcgtgacacatccagaagtgaagaagcttgttgctcctgtcgagctgtgcccaatactcaaaacactttataaaatcctaatcaagagggagcttgccactgactccattctccaggcaatacgagatgaatcaatgtatgatccacgggagaggattgagatgtctcagcgccagtgtctttaccgaccatctcttcttggcctacctaaagtagatattacccaggcttag

SEQ ID NO: 208 - protein, 465 aa, Oryza longistaminata
MVGSYAAGGGRGAAVAAVAEGKLDELRRRMGKADGDLLRIVGVGGGAWGSAFCALLQDAYGRHRDKAQVRVWRRPGRAVDRATAEHLFEVINSREDVLRRLIRRCAYLKYVEARLGDRTLYADEILRDGFCLNMVDTPLCPLKVVTNLQEAVWDADIVINGLPSTETREVFGEIGRYWKERIRPPVIISLAKGIEASIDPVPRIITPTQMISNATGVPLENILYLGGPNIASEIYNKEYANARICGADKWRKPLAKFLRQPHFIVWDNSDLITHEVMGGLKNIYAIGAGMVAALTNESATSKSVYFSLCTSEMIYITHLLAEDPEKLAGPLLADTYVTLLKGRNAWYGQKLAKGELTLEMGDSIKGKGTIQGVSAVHAFYELLSQSSLSVTHPEVKKLVAPVELCPILKTLYKILIKRELATDSILQAIRDESMYDPRERIEMSQRQCLYRPSLLGLPKVDITQA

SEQ ID NO: 209 - DNA, 1380 bp, Oryza longistaminata
  CDS (1)..(1380): homologue/similar gene in O. sativa: Xa21_Os05g0530400
atggagagttccaacctgggcggcggcggcggcggaggcggcggcggtgggccgccgccgttcttgatcaagacgtacgagatggtggaggacgcggcgaccaaccacgtcgtgtcgtggggccccggcggcgccagcttcgtcgtgtggaacccgctcgacttctcccgtgacctgctgcccaagtacttcaagcacaacaacttctccagcttcatcaggcagctcaacacctacggttttcgaaaaatcgatcctgagagatgggagttcgcaaacgaggatttcataagagggcacacgcaccttctgaagaacatccatcgacgcaagcccgtgcacagccactccctccagaaccagataaacggaccactcgccgaatcggagaggcgcgagctcgaagaagagatcaaccggctcaagtacgagaagagcatcctcgtcgcggatctccagaggcagaaccagcagcagtacgtgatcaactggcagatgcaggcgatggaaggcaggctggtggcgatggagcaacggcagaagaacatcgtggcctccctgtgcgagattctgcagagacgcggcggcgccgtgtcgagctcgctgctggagtccgaccatttcagcaagaagaggagggtcccgaagatggatctcttcgtcgacgattgcgcggcgggcgaagaacagaaggtgttccagttccagggaattgggacggatgcaccggccatgcctcccgtgcttcctgtgaccaatggtgaggcttttgacagggttgagctgagcttggtctccctggagaaactcttccagagagcaaatgatgcttgcacagctgctgaagaaatgtactcccatggtcatggtggtactgaacccagcactgctatatgtcctgaagagatgaacactgctccaatggagacaggcatcgatcttcagttaccagctagcctccatcccagatcacccagcacagggaatgcccatctccatttatccactgaactcacagagtctccaggttttgtgcagagtccagagctgccaatggcagagattcgtgaagatatccatgtgacaagatacccaacacaagctgatgtaaattctgagattgcctcctccactgatacttcacaagacggcacgtcagaaactgaagcttcgcatggaccgaccaacgatgtgttttgggagcggttcctcacagagactccacggtcatgtttggatgagtcagaaagacaagagagtctcaaggacgatgtaaaagcagaattaggctgcaatggcttccatcaccgggagaaggttgatcagatcaccgagcaaatggggcaccttgcttcagccgagcagactctgcatacctga

SEQ ID NO: 210 - protein, 459 aa, Oryza longistaminata
MESSNLGGGGGGGGGGGPPPFLIKTYEMVEDAATNHVVSWGPGGASFVVWNPLDFSRDLLPKYFKHNNFSSFIRQLNTYGFRKIDPERWEFANEDFIRGHTHLLKNIHRRKPVHSHSLQNQINGPLAESERRELEEEINRLKYEKSILVADLQRQNQQQYVINWQMQAMEGRLVAMEQRQKNIVASLCEILQRRGGAVSSSLLESDHFSKKRRVPKMDLFVDDCAAGEEQKVFQFQGIGTDAPAMPPVLPVTNGEAFDRVELSLVSLEKLFQRANDACTAAEEMYSHGHGGTEPSTAICPEEMNTAPMETGIDLQLPASLHPRSPSTGNAHLHLSTELTESPGFVQSPELPMAEIREDIHVTRYPTQADVNSEIASSTDTSQDGTSETEASHGPTNDVFWERFLTETPRSCLDESERQESLKDDVKAELGCNGFHHREKVDQITEQMGHLASAEQTLHT

SEQ ID NO: 211 - DNA, 639 bp, Oryza longistaminata
  CDS (1)..(639): homologue/similar gene in O. sativa: Xa21_Os05g0542500
atggcttcccaccaggaccaggctagctaccgcgccggcgagaccaaggcccacaccgaggagaaggcggggcaggtgatgggggcgagcaaggagaaggcgagcgaggcgaaggacagggcgtcggaggcggcggggcacgccgccggcaaggggcaggacaccaaggaggcgacgaaggagagggcgtcggagacggcgcaggcggcgaaggacaagacctccggcacggcgcaggcggcgagggagagggcgtcggagacggcgcaggcggcgaaggacaagacctccggcacggcgcaggcggcgagggacaaggccgccgagagcaaggaacagaccggcggcttcctcggcgagaagacagagcaggccaagcagaaggccgcagagaccgccggcgcagccaagcagaagaccgccgagacggcgcagtacaccaaggactccgccgtcgccggcaaggacaagaccggcagcgtcctccaacaggcgagtgagcaggtgaagagcacggtggtcggcgccaaggacgcggtgatgagcacgctggggatgaccggagacaaggccggcaccgacgacggcgccaacaaagacacctccgccgccacggagacgacggcgagggatcactag

SEQ ID NO: 212 - protein, 212 aa, Oryza longistaminata
MASHQDQASYRAGETKAHTEEKAGQVMGASKEKASEAKDRASEAAGHAAGKGQDTKEATKERASETAQAAKDKTSGTAQAARERASETAQAAKDKTSGTAQAARDKAAESKEQTGGFLGEKTEQAKQKAAETAGAAKQKTAETAQYTKDSAVAGKDKTGSVLQQASEQVKSTVVGAKDAVMSTLGMTGDKAGTDDGANKDTSAATETTARDH

SEQ ID NO: 213 - DNA, 777 bp, Oryza longistaminata
  CDS (1)..(777): homologue/similar gene in O. sativa: Xa21_OsI_16826(Os04g0541700)
atggatcggggtgaccaccaccacctccagcagcagcaccagttcttgatgccaccacctgcgccggtggtgccgccgcagctgtgcatgccggcgatgatggcggacgagcagtacatggacctgggcggtggcggggcggcggcggggaggggcggcggcggggagaggaagcggcggttcacggaggtgcagatacggtcgctggagtccatgttccacgcgcaccacgccaagctggagccccgcgagaaggcggagctggcgcgcgagctgggcctgcagccgcggcaggtggccatctggttccagaacaagcgcgcgcggtggcgctccaagcagctcgagcacgactacgccgcactccgctccaagtacgacgccctccactcccgcgtcgagtccctcaagcaagagaagctcgctctcaccgtccagttgcacgagctaagagtgaggctgagggaacgggaggagaggagcggcaacggtggtgccgccacgacggcagcaagcagcagcagctgcaacggatcaggcagcgaggaggtcgacgacgacaagaggaacgtcgccgcggggtgcctggacctcgagccgccggagagctgcgtgctcggcggcgcgacgtgcgccacgccggcggacgtgtcggtggagtcggatcagtgcgacgaccagcttgactacgaggagggcttgttcccggagtcgttctgcgccacgccggagctgtgggagccatggccgctagtcgagtggaatgcggtggcttga

SEQ ID NO: 214 - protein, 258 aa, Oryza longistaminata
MDRGDHHHLQQQHQFLMPPPAPVVPPQLCMPAMMADEQYMDLGGGGAAAGRGGGGERKRRFTEVQIRSLESMFHAHHAKLEPREKAELARELGLQPRQVAIWFQNKRARWRSKQLEHDYAALRSKYDALHSRVESLKQEKLALTVQLHELRVRLREREERSGNGGAATTAASSSSCNGSGSEEVDDDKRNVAAGCLDLEPPESCVLGGATCATPADVSVESDQCDDQLDYEEGLFPESFCATPELWEPWPLVEWNAVA

SEQ ID NO: 215 - DNA, 279 bp, Oryza longistaminata
  CDS (1)..(279): homologue/similar gene in O. sativa: Xa21_Os05g0495300upstream
atggctgtttggttggttttcactttccagcagttgtgcactcaaaaggatttgtcagttccagatcttgctgccggttacactgttgtttccggagccaggcctaagtgttggcagcggcagtgcagagtaagacagaattcagatgcagtgttggcgcggctagcaggcaacggtgatcctgtgcggcaagggacgagcaaagtttgtgggcagcaggatgaaacaatagtggccttgtgcactgatagtatttttgaagggactgcactgatatga

SEQ ID NO: 216 - protein, 92 aa, Oryza longistaminata
MAVWLVFTFQQLCTQKDLSVPDLAAGYTVVSGARPKCWQRQCRVRQNSDAVLARLAGNGDPVRQGTSKVCGQQDETIVALCTDSIFEGTALI

SEQ ID NO: 217 - DNA, 1314 bp, Oryza longistaminata
  CDS (1)..(1314): homologue/similar gene in O. sativa: Xa21_OsJ_19472(Os05g0552600)
atggcggagccggcaagatgggctctcttgctcctccttggcgtcgtactcctggcgcccgttacgctggcggtgcgtgttgaagatggcccgaagccaccgactcatccgaataatggtgataatgggaagcacgagaaccgcgtcaccgcccccacccgtatactcgccgccgccaccgccgcgttcatctcctccaccaccggttcccacgtcgccgccgccatcaccgctgccatcgcctcctccacctgtgccctcgtcaccgccaccaccagtgtcatcacctccaccaccggtgccctcttcgccaccgccgccagtggtgccatcgcctcctccaccggtgctctcctcgccgccaccaccagtggtggcatcccctccaccaccggtagtaccatcacctcctccaccaggagccagcgacgtggtctactgcacgaacaagacgaggtaccccacctgcacctcgccggcgtactgccccagcaggtgccccaaatcctgccacatggactgcgccacctgcaagaccactgcaacctgccgggcgcggtgtgccaggacccgcggttcatcggcggcgacggcaacacgttctacttccacggccgccgtgaccgcgacttctgcctgctctccgacgcaaacctgcacatcaacggccacttcatcggcaaccacgtcccgggcctcaagagggacccgacctgggtgcaggcgatcgccgtgcagttctccggcggccaccgcctctacgtcggcgcgcgcaggacggccgtgtgggacgacgactccgaccgcctcgccgtcgtgttcgacggcgagaccgtgcagctgcagcgcgtcgcgcacgccaggtgggagtcgggttccggcctgtccgtgacgcggaccaaggcggccaacggcgtcctcgtggagctcgacggcgtgttcaagatcaccgcgaacgtggtgcccatcaccaaggaggactcgaggatccacaggtacggggtcaccgacgacgactgcctcgcccacctcgacctggcgttcaagttctacgccctcaccgacgacgtccacggcgtgctgggccagacgtacaggagcagctacgtgaaccgcctcgacgtgtcggcgaagatgcccgtcatgggaggcgagaagcagttcacctcgtcgggtcttttcgccgctgactgcgccgtcgcgcggttcgggcgcgccggcgatgccggcgccgttgccattgcctccgaggagctggtcgacgtcaagtgctccaccggcctcgacggcgtcggggtggtgtgcaagaagtag

SEQ ID NO: 218 - protein, 437 aa, Oryza longistaminata
MAEPARWALLLLLGVVLLAPVTLAVRVEDGPKPPTHPNNGDNGKHENRVTAPTRILAAATAAFISSTTGSHVAAAITAAIASSTCALVTATTSVITSTTGALFATAASGAIASSTGALLAATTSGGIPSTTGSTITSSTRSQRRGLLHEQDEVPHLHLAGVLPQQVPQILPHGLRHLQDHCNLPGAVCQDPRFIGGDGNTFYFHGRRDRDFCLLSDANLHINGHFIGNHVPGLKRDPTWVQAIAVQFSGGHRLYVGARRTAVWDDDSDRLAVVFDGETVQLQRVAHARWESGSGLSVTRTKAANGVLVELDGVFKITANVVPITKEDSRIHRYGVTDDDCLAHLDLAFKFYALTDDVHGVLGQTYRSSYVNRLDVSAKMPVMGGEKQFTSSGLFAADCAVARFGRAGDAGAVAIASEELVDVKCSTGLDGVGVVCKK

SEQ ID NO: 219 - DNA, 663 bp, Oryza longistaminata
  CDS (1)..(663): homologue/similar gene in O. sativa: Xa21_Os06g0127100
atggagtacgacgagcaggaggagtacgcgacggtgacgtcggcgccgccgaagcggccggcggggaggaccaagttcagggagacgaggcacccggtgtaccgcggcgtgcggcggcgggggcccgcggggcggtgggtgtgcgaggtcagggagcccaacaagaagtcccgcatctggctcggcaccttcgccaccgccgaggccgccgcgcgcgcccacgacgtcgccgcgctcgccctccgcggccgcggcgcgtgcctcaacttcgccgactccgcccgcctcctccgcgtcgacccggccaccctcgccacccccgacgacatccgccgcgccgccatcgagctcgccgagtcatgcccgcacgacgccgccgccaccgccgccgctgcctccagctctgccgccgccgtcgaggccgccgccgccgccgcgcccgccatgatgatgcagtaccaggacgacatggcggcgacgccgtccagctacgactacgcgtactacggcaacatggacttcgaccagccgtcctactactacgacgggatgggcggcaccgccggcggcggcggcgagtaccagagctggcagatggacggcgacgacgatggcagcgccggtggctacggcggcggcgacgtcacactctggagctactga

SEQ ID NO: 220 - protein, 220 aa, Oryza longistaminata
MEYDEQEEYATVTSAPPKRPAGRTKFRETRHPVYRGVRRRGPAGRWVCEVREPNKKSRIWLGTFATAEAAARAHDVAALALRGRGACLNFADSARLLRVDPATLATPDDIRRAAIELAESCPHDAAATAAAASSSAAAVEAAAAAAPAMMMQYQDDMAATPSSYDYAYYGNMDFDQPSYYYDGMGGTAGGGGEYQSWQMDGDDDGSAGGYGGGDVTLWSY

SEQ ID NO: 221 - DNA, 1041 bp, Oryza longistaminata
  CDS (1)..(1041): homologue/similar gene in O. sativa: Xa21_Os06g0281800
atgaaactaagcaacatgacagcccttttgtcacttctgatctccatccttctggttgcgatagaggccagaggtttggtgggagtggaacgggtggagctgccaaatcctgcatctatggtaacagcatactggaaggagatgcttccccactctccaatgccgactgctatactcgagcttttgaaccctcctactgatgttaatcaaggtgtttatggcaatggctatgctcaagtttatggcaacggatatgatgaaggctaccttaacggatatagccattcctatggtaatggctattccaatggctattttcacaaggcaaatctccacttcttagaagatgccttaaaaccggggtccataatcactccttacatcacggggatagctacacgtgctccatttcttcgccgggacattgcggattcaatctcgatgagcacaaagaactttgccgacatcctaaaaatgttttcgcctatatccctcgtcatggccgacggtatacagtcggcattagacacatgtgagcaccaccaccctatcgagggcgaggaacgggcgtgtgccacatctatcgagtcggtggttgagtttgttatgtctgtgctcgggacacatgacctccgagccttctcccccgatgtcccaacagatggcgtcatgtcaggaaacaagtacaaggtggcagcggtaaggacagttgcgggctcaaagggggacactgtgacgtgccacaccatgaggttcccgttcgctgtgttctactgccacgcgatcaaccctacccgggtgtacgcggtggtgctggagagcgaggaggatggcagcggcacaccggagaagatggaggcgctcgccgtgtgccacctggacacgtcacgtttcgaccccaagactccattgttcgtcgagcacaatctcaggccgggagatgcgtcggtgtgccacttcgttagcagggacagcgtgatctgggcacctgtagctgctgtgataacacatggagatgaacaagtctcaattgccgagtag

SEQ ID NO: 222 - protein, 346 aa, Oryza longistaminata
MKLSNMTALLSLLISILLVAIEARGLVGVERVELPNPASMVTAYWKEMLPHSPMPTAILELLNPPTDVNQGVYGNGYAQVYGNGYDEGYLNGYSHSYGNGYSNGYFHKANLHFLEDALKPGSIITPYITGIATRAPFLRRDIADSISMSTKNFADILKMFSPISLVMADGIQSALDTCEHHHPIEGEERACATSIESVVEFVMSVLGTHDLRAFSPDVPTDGVMSGNKYKVAAVRTVAGSKGDTVTCHTMRFPFAVFYCHAINPTRVYAVVLESEEDGSGTPEKMEALAVCHLDTSRFDPKTPLFVEHNLRPGDASVCHFVSRDSVIWAPVAAVITHGDEQVSIAE

SEQ ID NO: 223 - DNA, 1014 bp, Oryza longistaminata
  CDS (1)..(1014): homologue/similar gene in O. sativa: Xa21_Os06g0313440
atgaagactctgatacaggaggcagtcacaggcttatgcacaagctcatgtcctcacccaaagaacatggtgatcgcggacttgggctgctcctccggaccaaacgcgctcacgctcgtctctgccgccgtcgacgccatccaccgctactgcgcgcagcacgagcaactgccgccggagatgtgcgtgctcctgaacgatctgcctggcaacgatttcaacaccgtggcgaagagcttggacacactgaagcacagtggtggtgatgctctcgctcaacctgctgttgtgatcaccggtatggtacctgggtcgttctacgagaggctattcgctcgtggctccttgcatttggtttgctcggctaacagcttgcattggttatccgaggcacctgaagatctcaagaagagtagaatcccgatgcatgatagtgatgaacagttgagatcatcaaggcatcaaattgtcgcggattcatatgctcggcagtttaggaaggatttcatgcgattcttgagcttgagggcacaggagattgtccctggaggccgaatggttgtctcactgttggtcaagcgctcggacaaacctgacactgagttaattcaaccatggacgccggcggtgacggctttaagtgacatggcattaaggggtgtcatcagcaaagaaaagcttgactccttctacattcccttgtgctgccctatggacagtgaagttaacaagatcatagaagaggagggttcatttgagatcaacaagatggtgatgcacgatccctatggcggcacgggcagagccttgctcgatctgaagatggtagccttgcgcgtaagagctgtatttgagccaataatagtgcagcattttgcagcgtcaaatgaaatcatggacgacttcgtcagagcagtggagcggcacttgatcagttctggggctctggaagctaggctgtccggccaacactcgtttgccttcttgtgtttgtctctcactagagcgatgtga

SEQ ID NO: 224 - protein, 337 aa, Oryza longistaminata
MKTLIQEAVTGLCTSSCPHPKNMVIADLGCSSGPNALTLVSAAVDAIHRYCAQHEQLPPEMCVLLNDLPGNDFNTVAKSLDTLKHSGGDALAQPAVVITGMVPGSFYERLFARGSLHLVCSANSLHWLSEAPEDLKKSRIPMHDSDEQLRSSRHQIVADSYARQFRKDFMRFLSLRAQEIVPGGRMVVSLLVKRSDKPDTELIQPWTPAVTALSDMALRGVISKEKLDSFYIPLCCPMDSEVNKIIEEEGSFEINKMVMHDPYGGTGRALLDLKMVALRVRAVFEPIIVQHFAASNEIMDDFVRAVERHLISSGALEARLSGQHSFAFLCLSLTRAM

SEQ ID NO: 225 - DNA, 216 bp, Oryza longistaminata
  CDS (1)..(216): homologue/similar gene in O. sativa: Xa21_OsI_22710(Os06g0313500)
atggcttctaggtctcttgtgttgatgtttgtgttgatggtttctcttgtcatcgtctctcagggtgtccttgctgcaagggagcttgcagagaaaaccaaagtggatgtagatggaatgaatgtcgaccttcctaaaggccgcaaaggtgcagttgcagtctcagggtacggtggtggttggtcagggtcatacggtggcagacactatccatga

SEQ ID NO: 226 - protein, 71 aa, Oryza longistaminata
MASRSLVLMFVLMVSLVIVSQGVLAARELAEKTKVDVDGMNVDLPKGRKGAVAVSGYGGGWSGSYGGRHYP

SEQ ID NO: 227 - DNA, 1407 bp, Oryza longistaminata
  CDS (1)..(1407): homologue/similar gene in O. sativa: Xa21_Os06g0318600
atgccgacggctgcgtcggagcgcgacggcggcggccgtgccgcgctggggaaggcggcggcggggctcgccgcggcggccgtggtgtcgctgaccgggctcgccgcggagcccctctcgccgccgccgccggcgcgggccgagtcgctcaccgtcgcgttccctgtctccaaggcccgtgaggtgaaccgggtgcagaggacgctggtggaggcgtgggggctgatccgtgagaccttcgtggatcccaccttcaatcaccaagattgggacatgagactgcagcagaccatggtggagatgttccctctgaaatcggaggatgccgcctatggtaagatcagtgggatgctgtccacactcggcgatccgttcaccaagatcatcagccccaaggaatatcagagtttcaggattggaagcgatgggagtgtccaaggggttggggtgttcataaacaaggagcctagctctggacgcttgcttgttatggactgcattgaaggtggcccagcagatcgagcaggcctgcatggaggcgatgaactagttgagatcgatgggaagagtgtttctgggttggatggagaagctgcagctcagagacttagaggtcgtgttggaacaactgtgaaagtgaaagtgttggatggcactgaaaacgaaaggaatggtaggataagacaaaaggaggtccagctatctcgtgaggttatcaatctttcacctctatcaacagcaattatctctcataggtcggacgatggccgtgagtgcaaaactgggtatgttaggctagctgcattctctcagactgctgcagctgaaatggaaagtgccattaagaagatggaggatgagggtgtccagtcatatattttagatctgcgaaataatcctggtggtctagtaaaagcaggtcttgacgtggctcaaatgtggttggatggaaatgaaactcttgtcaacactgttgaccgtgagggaaatgtcctaccaataaatatggcccggggccattctttaacacatgatccccttgtcgtacttgtcaatgaaggaagtgcaagtgcaagtgaaatcttggcaggagcattacatgacaatggtcgtgctattttggtcggccacagaacttttggaaaaggaaaaatacagagtgtgactgaattggatgatggatctgctctgtttatcacggtcgcaaagtatctctctccagcactgcatgaaatcgaccaagtaggcatccaacctgacatacaatgcacccctgaaatgttatctttgccaagagcaccttcgctaaaagaggacgacaaagccacaaatctggagatggattcatgtatcatggtggcagagcaagcattggaaattgagaaatcaaagggatctgcttcgtag

SEQ ID NO: 228 - protein, 468 aa, Oryza longistaminata
MPTAASERDGGGRAALGKAAAGLAAAAVVSLTGLAAEPLSPPPPARAESLTVAFPVSKAREVNRVQRTLVEAWGLIRETFVDPTFNHQDWDMRLQQTMVEMFPLKSEDAAYGKISGMLSTLGDPFTKIISPKEYQSFRIGSDGSVQGVGVFINKEPSSGRLLVMDCIEGGPADRAGLHGGDELVEIDGKSVSGLDGEAAAQRLRGRVGTTVKVKVLDGTENERNGRIRQKEVQLSREVINLSPLSTAIISHRSDDGRECKTGYVRLAAFSQTAAAEMESAIKKMEDEGVQSYILDLRNNPGGLVKAGLDVAQMWLDGNETLVNTVDREGNVLPINMARGHSLTHDPLVVLVNEGSASASEILAGALHDNGRAILVGHRTFGKGKIQSVTELDDGSALFITVAKYLSPALHEIDQVGIQPDIQCTPEMLSLPRAPSLKEDDKATNLEMDSCIMVAEQALEIEKSKGSAS

SEQ ID NO: 229 - DNA, 447 bp, Oryza longistaminata
  CDS (1)..(447): homologue/similar gene in O. sativa: Xa21_OsI_23134(Os06g0506600)
atggcgtccaagcggatcctcaaggagctcaaggacctgcagaaggatcccccaacctcctgcagcgctggccctgtgggagaagatatgttccactggcaagctacgattatgggtccagcagatagtccatatgcaggtggcgtcttcttggtttctattcacttccctccagactatccgttcaaaccgcccaaggttgcatttaagacaaaggttttccacccaaacatcaacagtaacggaagcatctgccttgatatcctgaaggaacagtggagccctgcattgacagtgtcaaaggtactcctctcaatttgttctctactgacggacccaaacccagacgacccgctagttccggagattgcgcacatgtacaagactgatcgggccaaatatgaatcaactgcgaggggctggacccagaaatatgcaatgggctga

SEQ ID NO: 230 - protein, 148 aa, Oryza longistaminata
MASKRILKELKDLQKDPPTSCSAGPVGEDMFHWQATIMGPADSPYAGGVFLVSIHFPPDYPFKPPKVAFKTKVFHPNINSNGSICLDILKEQWSPALTVSKVLLSICSLLTDPNPDDPLVPEIAHMYKTDRAKYESTARGWTQKYAMG

SEQ ID NO: 231 - DNA, 1023 bp, Oryza longistaminata
  CDS (1)..(1023): homologue/similar gene in O. sativa: Xa21_OsJ_22168(Os06g0649000)
atggattcgtggattgagcagacttccctgagcttggaccttaacgtcggcttgccgtcgacggcgaggagatcatcggctccggcggcgccgattaaggttctcgtggaggagaacttcttgtccgtcaagaaggatcacgaggttgaggcgctggaggcggagctccggcgagcgagcgaggagaacaagaagctgaccgagatgcttcgggcggtggtggccaagtacaccgagctgcagggacaggtcaacgacatgatgtcggcggcgacggcggcggcgaacgccgggaaccaccactcgtccacgtcggagggcggctcgatctcgccgtcgaggaagcggatccgtagcgtcgacagcctcgatgacgccgccccccaccaccacccccaccgcaagccgtccccgccgttcgtcgccgccgccgccgccgcagcctacacctcccccgaccagatggagtgcacgtcggcgtccgccgccgccgccaagcgcgtcgtccgcgaggactgcaagcccaaggtgtccaagcgcttcgtccacgccgacccctccgacctcagcctcgtggtgaaggatgggtatcaatggcggaagtacgggcagaaggtgacgaaggacaacccgtgcccgcgggcctacttcaggtgctcgttcgcgccggcgtgcccggtgaagaagaaggtgcagcgcagcgccgacgacaacaccgtcctcgtcgccacgtacgagggcgagcacaaccacgcccagccgccgcaccacgacgccgccggcagcaagaccgccgccgccgccaagcactcacagcaccagccgccaccgagcgccgccgccgccgtcgtccggcagcagcaagagcaggcggcggcggccgggccgtcgacggaggtggcggcgaggaagaacctggccgagcagatggcggcgacgctgacgagggaccccgggttcaaggcggcgctcgtcacggcgctctccggccggatcctcgagctctcgccgaccaagaactaa

SEQ ID NO: 232 - protein, 340 aa, Oryza longistaminata
MDSWIEQTSLSLDLNVGLPSTARRSSAPAAPIKVLVEENFLSVKKDHEVEALEAELRRASEENKKLTEMLRAVVAKYTELQGQVNDMMSAATAAANAGNHHSSTSEGGSISPSRKRIRSVDSLDDAAPHHHPHRKPSPPFVAAAAAAAYTSPDQMECTSASAAAAKRVVREDCKPKVSKRFVHADPSDLSLVVKDGYQWRKYGQKVTKDNPCPRAYFRCSFAPACPVKKKVQRSADDNTVLVATYEGEHNHAQPPHHDAAGSKTAAAAKHSQHQPPPSAAAAVVRQQQEQAAAAGPSTEVAARKNLAEQMAATLTRDPGFKAALVTALSGRILELSPTKN

SEQ ID NO: 233 - DNA, 234 bp, Oryza longistaminata
  CDS (1)..(234): homologue/similar gene in O. sativa: Xa21_Os07g0114300
atgggcggcggcaatgggcagaagtcgaagatggcgagggagaggaacatggagaagaacaagggcgccaaggggagccagcttgaggccaacaagaaggccatgaacatccagtgcaagatatgcatgcagactttcatctgcaccacctctgagaccaagtgcaaagagcatgctgaggcgaagcatccgaagagcgacctcaccgcgtgcttccctcacctcaagaaataa

SEQ ID NO: 234 - protein, 77 aa, Oryza longistaminata
MGGGNGQKSKMARERNMEKNKGAKGSQLEANKKAMNIQCKICMQTFICTTSETKCKEHAEAKHPKSDLTACFPHLKK

SEQ ID NO: 235 - DNA, 1923 bp, Oryza longistaminata
  CDS (1)..(1923): homologue/similar gene in O. sativa: Xa21_OsJ_22964(Os07g0129900)
atgtcctttctgccactcatcttcttccttggccttagcctagcatccatcaccaacggtgacgataaccaccagttcgtctacaatggcttcactagtgctaacaacctctcccttgacggcgtggccatggtgactcctgatggcctcgtcgagctcaccaacgatggaatccggatgaaaggccatgctttctacccgtctcctctgcacttccgccagtctcctaatggcatggtgcgatctttctctgtcttcttcgtgttcggcatcgtccctaccttctctgacctgaacagtggccatggcatcgccttcgtcattgcaccaagcaagaatttctcagatgctatcgcggcacaatactttgggctcttcaatagtgagaccgatggcaatgatagaggccacatctttgcaattgagcttgacaccgttaagaacacagagtttggggacatgaatgataatcatgttgggatcgatatcaataatctcacctctttgcgatcctaccccgctggatactatgaagagagtggaaggttcaaaaacctgacccttgcatccatggaggctatacaagtgtgggttgattatgacagagaagctactcggatcaacgtgaccatggctcctcttgccatggccaaacctgtgaggccattgttgtctgctacctacaacctctcaggattgctcatggagcgttcatacatcggcttctcttcctcgacaggcgcaactagtgcacgacactaccttcttggctggagcttcagtatgaatggaggaactgcgccggccatcgacattgccaagctgccaaagctacctcgtgttggtcctaagtctgatccatccaatctgttgcaaatcatattgccggtggcaaccgcagcattcctcgtggctgcgggtgctactgtttttctccttgtgcgaaggcgtatgaggtacactgagttgcgagaagattgggagatcgattttgggccacaccggttcgcatataaggatttgttccatgccacggaagggttccagaacaagaatttgctaggcacaggaggtgctgggagggtatacaaggggatgcttctagggtccaaacaagagatcgcagtgaaaaagataccacaaaattcgaaggaaagcatgaaacagtttgtagcggagattattagcataggccgccttgaccaccgcaatcttgttcacctcctcggttattcccgacgtaaaggtgaattgattttagtgtacgagtatatgtcaaatggaagcttggaaaagtacttgtatggtcaagatggtaggtgcactttggattggggtcaacggtttcaaatcatcaaagggatcgcgtctgggttgctttacctccatgaagaatgggagaaagtagtgattcatcgagatgtgaagccaagtaacatactcctcgacaacaagatgaatgcaaagataggtgactttggcctctcaaggttgcacgatcatggagccaatccacaaactacacacgttgttggcaccatagggtacttagctccagaaatagcattgaccggcaaggtgactccactcgccgacgtattttccttcggcatattagccctagagattacatgtgggcagaaacctatgaagcaaaatgcacaaggcatccaacaaacattggttggttgggtgctagaatgttggaaaaaaggatcagttgttgatgcagttgatgccaacctccaagctgactatgatattgctgaagcaagtttagtgctaaaattaggattgctatgctcacatccatctgaacactcaagaccgaatatgagacaagtgacgcagtatctcaatggtgacatgccactaccagaaactatttcaattcaaacccaggatttggcttgtttcacttga

SEQ ID NO: 236 - protein, 640 aa, Oryza longistaminata
MSFLPLIFFLGLSLASITNGDDNHQFVYNGFTSANNLSLDGVAMVTPDGLVELTNDGIRMKGHAFYPSPLHFRQSPNGMVRSFSVFFVFGIVPTFSDLNSGHGIAFVIAPSKNFSDAIAAQYFGLFNSETDGNDRGHIFAIELDTVKNTEFGDMNDNHVGIDINNLTSLRSYPAGYYEESGRFKNLTLASMEAIQVWVDYDREATRINVTMAPLAMAKPVRPLLSATYNLSGLLMERSYIGFSSSTGATSARHYLLGWSFSMNGGTAPAIDIAKLPKLPRVGPKSDPSNLLQIILPVATAAFLVAAGATVFLLVRRRMRYTELREDWEIDFGPHRFAYKDLFHATEGFQNKNLLGTGGAGRVYKGMLLGSKQEIAVKKIPQNSKESMKQFVAEIISIGRLDHRNLVHLLGYSRRKGELILVYEYMSNGSLEKYLYGQDGRCTLDWGQRFQIIKGIASGLLYLHEEWEKVVIHRDVKPSNILLDNKMNAKIGDFGLSRLHDHGANPQTTHVVGTIGYLAPEIALTGKVTPLADVFSFGILALEITCGQKPMKQNAQGIQQTLVGWVLECWKKGSVVDAVDANLQADYDIAEASLVLKLGLLCSHPSEHSRPNMRQVTQYLNGDMPLPETISIQTQDLACFT

SEQ ID NO: 237 - DNA, 330 bp, Oryza longistaminata
  CDS (1)..(330): homologue/similar gene in O. sativa: Xa21_OsJ_23939(Os07g0410300)
atggcctacgaccaggccgcgctctcggcgcggggcgcggccgcggcgctcaacttccccgtggaacgcgtgcgcgagtcgctccgcgcgctcgcgctcggcgcggccggcggctcgcccgtgctggcgctgaaggggcggcactccaagcgaaagcggcggaagagatcagagctggccggtgccacggcgacggcgaacaagacgacgacgacgacgacgtccgccacgaccggcggggagcacaagcagatcgtcctcgagctggaggacctcggcgccgactacctagaggagctcctctggatgtccgagcaaactagccattga

SEQ ID NO: 238 - protein, 109 aa, Oryza longistaminata
MAYDQAALSARGAAAALNFPVERVRESLRALALGAAGGSPVLALKGRHSKRKRRKRSELAGATATANKTTTTTTSATTGGEHKQIVLELEDLGADYLEELLWMSEQTSH

SEQ ID NO: 239 - DNA, 348 bp, Oryza longistaminata
  CDS (1)..(348): homologue/similar gene in O. sativa: Xa21_Os07g0529800
atgtctgatctcgacattcagatcccaactgccttcgatccctttgctgaggccaatgctggagactctggtgcggctgcaggatcaaaggactacgttcatgtacgcatccagcagcgtaatggccgtaagagcctgaccactgtccagggattgaagaaggaattcagctacaacaagatcctcaaagatctcaagaaagagttctgctgcaatggtactgttgtccaggacccagagcttggccaggtcattcaacttcagggtgatcagaggaagaacgtatcaaattttcttgttcaggccggcattgtgaagaaggaacacatcaagattcatggtttctga

SEQ ID NO: 240 - protein, 115 aa, Oryza longistaminata
MSDLDIQIPTAFDPFAEANAGDSGAAAGSKDYVHVRIQQRNGRKSLTTVQGLKKEFSYNKILKDLKKEFCCNGTVVQDPELGQVIQLQGDQRKNVSNFLVQAGIVKKEHIKIHGF

SEQ ID NO: 241 - DNA, 1716 bp, Oryza longistaminata
  CDS (1)..(1716): homologue/similar gene in O. sativa: Xa21_Os07g0545800
atggacttgcaccagttattaaagtacagattgactggcgctaacgttgtgtacgaaattcctacagagaacaacttgcaaaactctccctggcaagctaacccactgaagtacgagttcagcgattccccatacacccctctctcttcccaatttgagtgtgacaatttgtctgctcttaccaacactccagataaccagagctctacagaaaccatttcagcccaaccaatctccccattggaagcagacagctcatatagacaggcgggtattcttctccaggagaacattcaagtgggagctgatccgttgtatgctacatcaagacataatatgcaacacgccttacgggagattgagactgttctgatggcacctgatacagatgatgcaacaactagcaccaagcatgagtttgaggaaatcaagcctgctcagcttgtgaggcagcggtcgagaacatggagtcatgaatcacggcagccgttacctggagttggtcggtcacagtttgcatctggtggataccccacagcaagctatgaatttcgtccagagaaacggcaaagggagttaagggaagaccctcagataattgtgaagcagctattaaccaggtgtgctgaggctctgagtgaggacaggacagaggagttccataagcttgttcaggaggctcgtggagtggtctcaatcaacggggaaccaatccaacgtctaggtgcttacctactggagggtttggttgctagacatggaaactctggcacaaacatctaccgtgctctgaagtgccgtgagccagagagcaaggagctcctgtcctacatgagaattctatacaatatctgcccttacttcaagtttggctatatggcagccaatggggcgattgcagaagcattgagaactgagaacaatatccacataattgattttcagattgctcaagggactcaatggatcacactgatacaagcattagctgcaaggcctggtggtcctcctcgtgtgcggatcaccgggatagatgacccagtgtcagagtatgctcgtggtgaaggtcttgacattgtggggaaaatgttgaaaagcatgtctgaagaattcaaaatacctctggagtttacgcctctgtctgtctatgccacacaagtcacgaaagagatgcttgagatcaggccaggtgaagcactggctgtaaacttcacactccagctacaccacaccccggacgagagcgtggatgtcaacaacccacgcgatggtctgctccggatggtgaaagggctgtccccgaaggtgactactttggtagagcaggagtcacacaccaacacaacgcccttcttgatgaggtttggggagaccatggagtactactccgccatgttcgagtcgatcgacgccaacctgccgcgggacaacaaggagaggatcagcgtggagcagcactgcctcgccaaggacatcgtcaacatcatcgcctgcgaggggaaggacagggtggagaggcatgagctgcttggcaagtggaagtcgaggctgaccatggccggcttcaggccttacccgctgagctcctacgtcaactcggtgataaggaagcttctcgcctgctactccgataaatacacactggatgagaaggacggcgcgatgcttctcggctggaggagcagaaaactgatatctgcttctgcgtggcactga

SEQ ID NO: 242 - protein, 571 aa, Oryza longistaminata
MDLHQLLKYRLTGANVVYEIPTENNLQNSPWQANPLKYEFSDSPYTPLSSQFECDNLSALTNTPDNQSSTETISAQPISPLEADSSYRQAGILLQENIQVGADPLYATSRHNMQHALREIETVLMAPDTDDATTSTKHEFEEIKPAQLVRQRSRTWSHESRQPLPGVGRSQFASGGYPTASYEFRPEKRQRELREDPQIIVKQLLTRCAEALSEDRTEEFHKLVQEARGVVSINGEPIQRLGAYLLEGLVARHGNSGTNIYRALKCREPESKELLSYMRILYNICPYFKFGYMAANGAIAEALRTENNIHIIDFQIAQGTQWITLIQALAARPGGPPRVRITGIDDPVSEYARGEGLDIVGKMLKSMSEEFKIPLEFTPLSVYATQVTKEMLEIRPGEALAVNFTLQLHHTPDESVDVNNPRDGLLRMVKGLSPKVTTLVEQESHTNTTPFLMRFGETMEYYSAMFESIDANLPRDNKERISVEQHCLAKDIVNIIACEGKDRVERHELLGKWKSRLTMAGFRPYPLSSYVNSVIRKLLACYSDKYTLDEKDGAMLLGWRSRKLISASAWH

SEQ ID NO: 243 - DNA, 1038 bp, Oryza longistaminata
  CDS (1)..(1038): homologue/similar gene in O. sativa: Xa21_Os07g0581000
atggaggcggagaagaagccgccggcggtgtccgacgtcggggcgtgggcgatgaacgtcgtcagctccgtcggcatcatcatggcaaacaagcagctcatgtcctcctccggctacgccttctccttcgccacgacgctgaccggattccacttcaccgtcacggcgctcgtcggatggatctccaacgccaccggctactccgtatccaagcacgtcccgctctgggagctcgtctggttctccctcgtcgccaacacgtccatcaccgggatgaaccttagtctcatgctcaactccgtcggtttctatcagatctcgaaattgagcatgatcccggtggtttgcttgatggaatgggtgctcaacagcaagcactacaccaccaaggttatatcggccgtggtcgtcgtggcggcgggtgttgggatttgcacggtcacggatgtggaggtcaatgccaagggattcatctgcgcttgcgtggctgtcttctgcacgtcgcttcaacagattacaattggctcctttcagaagaagtacaacatagggtcatttgaacttctcagcaaaactgcaccaatacaggctgtgtctcttattatacttggtccctttgctgactattacctcaatgggcgatggttattaaactacaacttctcaactggggcaactttcttcatattgctttcttgctccttggctgtcttctgcaacatgagccagtacctctgcatcggccggttctctgcaacttcgttccaggtcctgggccacatgaagaccgtgtgcgtgctgattcttggctggatcctgttcgactcggccctcaccgtgaagaacatcctcgggatgctgctcgccgtgatgggcatggtggtctacagctgggccgtggagaccgagaagaaggcctccgccccaatcccccggaacaagagcgacatgctggacgactccgaggacgttcccctcaaggccagggtgagcggcctcccctcgtccgacctcgaggaaggcgagatgaagagctag

SEQ ID NO: 244 - protein, 345 aa, Oryza longistaminata
MEAEKKPPAVSDVGAWAMNVVSSVGIIMANKQLMSSSGYAFSFATTLTGFHFTVTALVGWISNATGYSVSKHVPLWELVWFSLVANTSITGMNLSLMLNSVGFYQISKLSMIPVVCLMEWVLNSKHYTTKVISAVVVVAAGVGICTVTDVEVNAKGFICACVAVFCTSLQQITIGSFQKKYNIGSFELLSKTAPIQAVSLIILGPFADYYLNGRWLLNYNFSTGATFFILLSCSLAVFCNMSQYLCIGRFSATSFQVLGHMKTVCVLILGWILFDSALTVKNILGMLLAVMGMVVYSWAVETEKKASAPIPRNKSDMLDDSEDVPLKARVSGLPSSDLEEGEMKS

SEQ ID NO: 245 - DNA, 1635 bp, Oryza longistaminata
  CDS (1)..(1635): homologue/similar gene in O. sativa: Xa21_Os07g0583600
atggctgatactccaacttcccgaatgattcatcccttcaacaatataccgagccaaaacctgaagcagttccagtattctgataatcctcagcacccttgccacccttatagggcaccttcagacacccacgttgtgccacatcattatggcctaaagtcacattcaccggatgctggttatgaaagccaggctactcctaacaagtacacattggactcctctgaaggtgctggttgtatgagacatgattctccttccagtcaaagtttcacaaccagaagtggtagccctctatctcaggaagacagccactctgactcgactgatggatctcctgtaggcgcctcctgtgtcactgaggatcctaatgatctgaagcaaaaactgaaggatctcgaggccgttatgcttgggccagactcggagatagtcaacagcctcgagaattctgtggcaaaccaactttccttggagccggagaagtgggtgcgcatgatgggcattcccagaggcaacttgaaagagctactgattgcctgtgctagagctgtggaagagaagaatagcattgctattgatatgatgattccagagctgagaaaaatggtttcagtatctggtgagccacttgagaggttgggagcctacatggtagaagggcttgttgccaggcttgcctcctctggcaattcaatctacaaagctttgaaatgcaaggaaccaaagagctctgaccttctgtcttacatgcacttcctgtatgaggcctgcccctacttcaagttcggctatatgtcggcgaatggtgctattgcagaggctgtcaagggagaagacaggattcatatcatcgacttccatatctctcaaggggctcagtggatctctctccttcaggcccttgcagccaggcctggtggaccaccaactgtaaggatcactggtattgatgactcagtgtcagcttacgcacgaggcggcgggctagagctggtcggaaggaggctgtcccacatcgccggcctgtgcaaggtgccctttgaattccacccgcttgctatctccggcagcaaggtggaggcggcgcatctcggagtcatccccggggaagccctcgccgtgaacttcaccctggagctgcaccacattccagacgaatcggtgagcacggcgaaccaccgtgatcgcctcctgaggatggtgaagagcctgtcgccgaaggtgctcaccctggtggagatggagtccaacacgaacaccgcgccgttcccgcagaggttcgcggagacgctggactactacaccgccatcttcgagtccatcgacctgacgctgccgaggggcgacagggagaggatcaacatggagcagcactgcctcgcgagggagatcgtcaacctcatcgcgtgcgagggggaggagagggcggagcggtacgagcccttcggcaagtggaaggcgcgcctcaccatggccgggttcaggccgtcgccgctcagctcgctggtgaacgccaccatcaggacgctgctgcagagctactcggacaactacaagctcgccgagagggacggggcgctctacctcgggtggaagagcaggccactggtggtctcgtcggcgtggcactag

SEQ ID NO: 246 - protein, 544 aa, Oryza longistaminata
MADTPTSRMIHPFNNIPSQNLKQFQYSDNPQHPCHPYRAPSDTHVVPHHYGLKSHSPDAGYESQATPNKYTLDSSEGAGCMRHDSPSSQSFTTRSGSPLSQEDSHSDSTDGSPVGASCVTEDPNDLKQKLKDLEAVMLGPDSEIVNSLENSVANQLSLEPEKWVRMMGIPRGNLKELLIACARAVEEKNSIAIDMMIPELRKMVSVSGEPLERLGAYMVEGLVARLASSGNSIYKALKCKEPKSSDLLSYMHFLYEACPYFKFGYMSANGAIAEAVKGEDRIHIIDFHISQGAQWISLLQALAARPGGPPTVRITGIDDSVSAYARGGGLELVGRRLSHIAGLCKVPFEFHPLAISGSKVEAAHLGVIPGEALAVNFTLELHHIPDESVSTANHRDRLLRMVKSLSPKVLTLVEMESNTNTAPFPQRFAETLDYYTAIFESIDLTLPRGDRERINMEQHCLAREIVNLIACEGEERAERYEPFGKWKARLTMAGFRPSPLSSLVNATIRTLLQSYSDNYKLAERDGALYLGWKSRPLVVSSAWH

SEQ ID NO: 247 - DNA, 1374 bp, Oryza longistaminata
  CDS (1)..(1374): homologue/similar gene in O. sativa: Xa21_OsJ_25599(Os07g0680900)
atgggtcccccggatgttatctctgaaaatgatgagtttgatttctctgatgtttttggcaccactccagttcagacgccaacaggcatttcggtagctggtccagacagtcctgcacctttggctgagtccaatgagggggtttacaatgatcctattgtcatcatcaagcgatctcattctcttgttggtccaacatcacttgttagccagtccctgcgacttagcaatctcactctaaataaaacagaggggtcatcagaacctgcagaagaaaaggaaaggaacctagggcagctcagtgatgaagagtttgacaatgccacaacagaaaatgaaggtattgggcttgatgactttgaaatcttgaagcttgtaggccaaggggcatttgggaaagtctttcaggtgagaaagaaaggtacttcagagatatacgcgatgaaagttatgaggaaggataagatcttggaaaagaaccatgcggagtacatgaaagccgaaagagatatattaacaaaagttgaccatccttttgtagtgcagctcaggtactcctttcagacaaaatatcgactttatcttgtcctggacttcataaatgggggacatctcttcttccagctctacaagcaaggattgttcagggaggaacttgcacggatctatactgctgaaattgtatctgctgtagctcaccttcacgacaacgggattatgcatagagatctcaagcctgaaaatatccttttggatgctgatggccatgccatgctcactgactttggccttgccaaagaatttaatgagaatacaagatcaaactcgatgtgtggaacggttgagtatatggccccagagattattcttggtcgggggcatgataaggcagctgactggtggagtgttggaatcctcctctttgaaatgctcacgggaaagcctccgtttgttgggaacagggataaagttcagcagaagatagtgaaagagaagctgaagcttccatcgtttttgtccagtgaagctcattccctcttgaaaggactgctccacaaagaaggtggcaagcggctaggaagcggtccgggcggcagcgatgagataaagaggcacaaatggctcaaaccgatcaactggaggaagctggaggcccggcagatccagccgagcttccgacccaacgtgagcgggctcacctgcatcgccaacttcgacgagtgctggaccagcatgccggtgctggactcgccggtggccacccccgtcgccggcggcgccggccacagcagcttcgccgggttcacctacgtcaggccggctccgttcctccaggatgtcaagcctccctcttcctctaggctgaaagactag

SEQ ID NO: 248 - protein, 457 aa, Oryza longistaminata
MGPPDVISENDEFDFSDVFGTTPVQTPTGISVAGPDSPAPLAESNEGVYNDPIVIIKRSHSLVGPTSLVSQSLRLSNLTLNKTEGSSEPAEEKERNLGQLSDEEFDNATTENEGIGLDDFEILKLVGQGAFGKVFQVRKKGTSEIYAMKVMRKDKILEKNHAEYMKAERDILTKVDHPFVVQLRYSFQTKYRLYLVLDFINGGHLFFQLYKQGLFREELARIYTAEIVSAVAHLHDNGIMHRDLKPENILLDADGHAMLTDFGLAKEFNENTRSNSMCGTVEYMAPEIILGRGHDKAADWWSVGILLFEMLTGKPPFVGNRDKVQQKIVKEKLKLPSFLSSEAHSLLKGLLHKEGGKRLGSGPGGSDEIKRHKWLKPINWRKLEARQIQPSFRPNVSGLTCIANFDECWTSMPVLDSPVATPVAGGAGHSSFAGFTYVRPAPFLQDVKPPSSSRLKD

SEQ ID NO: 249 - DNA, 1575 bp, Oryza longistaminata
  CDS (1)..(1575): homologue/similar gene in O. sativa: Xa21_Os08g0163400
atgacggcgacgccggcggtgatcgggctgagcgcggggaacaggctgctgagcgcgtcgttcgggccgaccgaactgatgccggacaaggtcagcctcggcgtcgggggaggaggaggtggtggtggaggtggggacgcgatgtcgttcgcgccgccggcgcccgcgacgccgaagctcaccgcggtcgccgcgcacaggctcaagctctccccgcatggccgcgcgcaggtcatgcgcgcgctcaggcaccactcctccgcggcggccgcgctcgcgcccccgcccccgccccccccgacgccgtcgcccgcctctcgcgccgcccacgcccatgacctcgagtcctccctcgaggccatcgtgctgctgcagaggtccatgctcgagaagcagtgggagctccccttcgacgacgaagaccacgtctccgacgacgacgacaaccacgccatggccatcggcttagccgaggatgacagcaaggacgccaacaaggccaccgtcgtcgtggcgcggtccagtgtctcggcgaggcagaggaggatgagcgggcggcggcgggggaggaccaagaacggcgcggcgcacttcgccgtcagccccgagctgatgcagagcaggaacaggatctacctcaggggcaccgtcagcaaggagctcctcacgcacaagcaggtcgtccacctctcccacaagatcaaggatggcatctggttgcagcagcaaagatcaaagctgaaagagaagctgggaaatgagccctcatacaaacagctggcgcattcgctgaagatatcaccgcccgagctacgatcaaggatgcgcgagtcgtttctcgcaagggagatgctaacaatgagcaacctccgtttggtcatttccattgcccagaagtatgataaccttggtgttgagttggctgacctcattcagggtggtctgatagggttactccgtgggatcgaaaaatttgatgcatccaggggctttagaatttccacgtatgtatactggtggatacgccagggtgtttcaagagcattagctgagaactcaaaaacattcaggcttccaacttatctgcatgagcggctgattgcgattcgtggtgcaaagtatgcgttggaagatcaaggaattgctccaacaatagaaaacatagcagggtcactcaacatatcagaaaagaaagtactcaatgctacagaggctgtgaacaaggttctttcgttggatcaacaagcatttccatccttaaacggcttacctggagagacactgcacagttacatagaggatcaaaatgtcgcaaatgatccatggcatggatttgaggagtggtatctcaaggaagaagtcaacaagcttttaaactcaactctcaacgagcgtgagagggacattatccggttatatcatggcataggaaaacaatgccatacatgggaggacattagcagacaattcgggttgtcgagggagagggtgaggcaagtaggactcattgcaatggagaagctgaagcatgctgcgaggaggaaaaatttggaggcattgcttgaggattattga

SEQ ID NO: 250 - protein, 524 aa, Oryza longistaminata
MTATPAVIGLSAGNRLLSASFGPTELMPDKVSLGVGGGGGGGGGGDAMSFAPPAPATPKLTAVAAHRLKLSPHGRAQVMRALRHHSSAAAALAPPPPPPPTPSPASRAAHAHDLESSLEAIVLLQRSMLEKQWELPFDDEDHVSDDDDNHAMAIGLAEDDSKDANKATVVVARSSVSARQRRMSGRRRGRTKNGAAHFAVSPELMQSRNRIYLRGTVSKELLTHKQVVHLSHKIKDGIWLQQQRSKLKEKLGNEPSYKQLAHSLKISPPELRSRMRESFLAREMLTMSNLRLVISIAQKYDNLGVELADLIQGGLIGLLRGIEKFDASRGFRISTYVYWWIRQGVSRALAENSKTFRLPTYLHERLIAIRGAKYALEDQGIAPTIENIAGSLNISEKKVLNATEAVNKVLSLDQQAFPSLNGLPGETLHSYIEDQNVANDPWHGFEEWYLKEEVNKLLNSTLNERERDIIRLYHGIGKQCHTWEDISRQFGLSRERVRQVGLIAMEKLKHAARRKNLEALLEDY

SEQ ID NO: 251 - DNA, 279 bp, Oryza longistaminata
  CDS (1)..(279): homologue/similar gene in O. sativa: Xa21_OsJ_26407(Os08g0205700)
atgagctaccagactcctcctcctgctgccacagggtacccctacccggcgcaagaagcagggcagcagcagcagcaggcgtaccctgcctacgtggcgccgccgccggccggctacccgaccaaggacggcccgcaggagcagtaccccgccggcgccggcgccggcgagaccaccagccgcggccaccaccaccaccaccaccaccacggcgacggattctggaaaggatgctgcgctgcactctgctgctgctgcctcctcgacatgtgcttctga

SEQ ID NO: 252 - protein, 92 aa, Oryza longistaminata
MSYQTPPPAATGYPYPAQEAGQQQQQAYPAYVAPPPAGYPTKDGPQEQYPAGAGAGETTSRGHHHHHHHHGDGFWKGCCAALCCCCLLDMCF

SEQ ID NO: 253 - DNA, 2100 bp, Oryza longistaminata
  CDS (1)..(2100): homologue/similar gene in O. sativa: Xa21_OsI_29768(Os08g0500700)
atggcctcggagacggagacgttcgccttccaggcggagatcaaccagctgctgtcgctcatcatcaacacgttctactccaacaaggagatcttcctccgcgagctcatctccaactcctccgatgcgttggacaagatcaggttcgagagcttgacggacaagagcaagctggatgctcagccagagctgttcatccatattgttcctgacaaggcctccaacacactctcgatcatcgacagtggtattggtatgaccaagtcagatcttgtgaacaacctgggtaccattgccaggtcagggaccaaggagttcatggaggcactggctgctggtgctgatgtgtccatgattggtcagttcggtgttggattctactctgcctaccttgttgccgagagagtggttgtgaccaccaagcacaacgatgacgagcagtatgtgtgggagtctcaggctggtgggtccttcactgtcacacgtgacacatctggggagcagcttgggaggggtactaagatcaccctctacctcaaggacgatcagttggaataccttgaagagcgccgcctcaaggacctgatcaagaagcactctgagtttatcagctaccctatctctctatggactgagaagaccaccgagaaggaaatttctgatgatgaagatgaggaagagaagaaggatgctgaggagggcaaggttgaggatgttgatgaagagaaggaagaaaaggagaagaaaaagaagaagatcaaggaggtttctcatgagtggtccctggtcaacaaacagaagcctatctggatgaggaagcctgaggagatcactaaggaggagtatgctgctttctacaagtccctgacaaacgactgggaggagcatcttgctgtcaagcacttctccgtggagggtcagctggagttcaaagctgttctctttgttcccaagagggcaccattcgacctctttgatacgaggaagaagctcaacaacatcaagctctatgtccgccgagtcttcatcatggacaactgtgaggagctgatccctgagtggctgagctttgtcaagggcattgtcgactccgaggatcttcccctcaacatctcccgtgagatgctgcagcagaacaagattctcaaggtcatccggaagaaccttgtcaagaagtgcgttgagctcttcttcgagattgctgagaacaaggaggactacaacaagttctatgaggccttctccaagaacctcaagctcggtatccacgaggactccaccaacagaaacaagattgccgagctcctgaggtaccactccaccaagagcggcgatgagctgaccagcctcaaggattacgtgacgaggatgaaggaaggccagaacgacatatactacatcaccggcgagagcaagaaggccgtggagaactcccccttcttggagaagctgaagaagaagggttacgaggtcctctacatggttgatgccatcgacgagtacgctgttggccagctcaaggagtttgagggcaagaagctcgtctctgccaccaaggagggactcaagcttgatgagagcgaggacgagaagaagcggaaggaggagctcaaggagaagtttgaggggctctgcaaggtcatcaaggaggtgctcggagacaaggtcgagaaggtggtggtctcggaccgcgtggtggactccccgtgctgcctcgtcaccggcgagtacggctggacggccaacatggagaggatcatgaaggcccaggcgctgagggactcgagcatggccgggtacatgtcgagcaagaagacgatggagatcaacccggagaacgccatcatggaggagctccgcaagcgcgccgacgccgacaagaacgacaagtccgtcaaggacctcgtcttgctcctcttcgagacggccctcctcacctccggcttcagcctcgacgaccccaacaccttcggcagcaggatccaccgcatgctcaagcttggcctgagcatcgacgaggatgagacggcggaggccgacaccgacatgccgccgctcgaggacgacgccggcgagagcaagatggaggaggtcgactaa

SEQ ID NO: 254 - protein, 699 aa, Oryza longistaminata
MASETETFAFQAEINQLLSLIINTFYSNKEIFLRELISNSSDALDKIRFESLTDKSKLDAQPELFIHIVPDKASNTLSIIDSGIGMTKSDLVNNLGTIARSGTKEFMEALAAGADVSMIGQFGVGFYSAYLVAERVVVTTKHNDDEQYVWESQAGGSFTVTRDTSGEQLGRGTKITLYLKDDQLEYLEERRLKDLIKKHSEFISYPISLWTEKTTEKEISDDEDEEEKKDAEEGKVEDVDEEKEEKEKKKKKIKEVSHEWSLVNKQKPIWMRKPEEITKEEYAAFYKSLTNDWEEHLAVKHFSVEGQLEFKAVLFVPKRAPFDLFDTRKKLNNIKLYVRRVFIMDNCEELIPEWLSFVKGIVDSEDLPLNISREMLQQNKILKVIRKNLVKKCVELFFEIAENKEDYNKFYEAFSKNLKLGIHEDSTNRNKIAELLRYHSTKSGDELTSLKDYVTRMKEGQNDIYYITGESKKAVENSPFLEKLKKKGYEVLYMVDAIDEYAVGQLKEFEGKKLVSATKEGLKLDESEDEKKRKEELKEKFEGLCKVIKEVLGDKVEKVVVSDRVVDSPCCLVTGEYGWTANMERIMKAQALRDSSMAGYMSSKKTMEINPENAIMEELRKRADADKNDKSVKDLVLLLFETALLTSGFSLDDPNTFGSRIHRMLKLGLSIDEDETAEADTDMPPLEDDAGESKMEEVD

SEQ ID NO: 255 - DNA, 1146 bp, Oryza longistaminata
  CDS (1)..(1146): homologue/similar gene in O. sativa: Xa21_Os08g0520000
atgggcatggaggaggagggggtggcgcgcggcggcggcggcggcaagaagctcgcgctcgccagcatcggcttcgcggacgtccgtgtcggcgccgtggctggcggcggcggcgggtacaaggaagacttggtagtcgtgggcctgcccaaggacgacgacttcgatgtcgccaaggtcgtcggggacgtggccgtcgggctgccggacgtcggcggcgccgtcaggaatttcctgaggaatagagaagttggagaattcatgagtggggcattagctggtgctatgactaaagctgttcttgctcctctagaaactatcaggacaagaatggttgttggggtaggatcaaaacacatttttggtagttttgtggagatcgtcgaacaaaatggctggcaaggactctgggcaggtaatacaataaatatgctccggattattccaactcaagcacttgagcttggcacatttgagtgtgtcaaaaggagcatgacagaagcacaagagaaatggaaggaagatgggtgcccaaagatacaaattggcaatttgaaaattgagctgccgcttcacttgctctctccaattgctgttggtggtgcggctgctggaatagttagcaccttagtgtgccatcctcttgaggttcttaaggaccgcctgactatcaaccgtgaggcttatccaagtatcggccttgccttcaacaagatataccaaactgatggtattggtggtctctatgctggcctctgcccaacactagttggcatgcttccttatagcacctgctactatttcatgtatgagacgatcaagacttcttattgccgtgcacataaaaagaagtccttgacccgtcctgagctactcataattggagctctttcaggtctaactgcaagtacaataagcttccctctggaagtggcgaggaagcggcttatggttggaaccctgcaagggaaatgcccgccccacatgatcgcggccttagctgaggtgttccaagaggagggcatcaagggactttaccgcggatgggccgcaagctccctgaaggtgatgccgacctccggcattacctggatgttctatgaggcatggaaggacattcttttggctccagagctgcacacctag

SEQ ID NO: 256 - protein, 381 aa, Oryza longistaminata
MGMEEEGVARGGGGGKKLALASIGFADVRVGAVAGGGGGYKEDLVVVGLPKDDDFDVAKVVGDVAVGLPDVGGAVRNFLRNREVGEFMSGALAGAMTKAVLAPLETIRTRMVVGVGSKHIFGSFVEIVEQNGWQGLWAGNTINMLRIIPTQALELGTFECVKRSMTEAQEKWKEDGCPKIQIGNLKIELPLHLLSPIAVGGAAAGIVSTLVCHPLEVLKDRLTINREAYPSIGLAFNKIYQTDGIGGLYAGLCPTLVGMLPYSTCYYFMYETIKTSYCRAHKKKSLTRPELLIIGALSGLTASTISFPLEVARKRLMVGTLQGKCPPHMIAALAEVFQEEGIKGLYRGWAASSLKVMPTSGITWMFYEAWKDILLAPELHT

SEQ ID NO: 257 - DNA, 1443 bp, Oryza longistaminata
  CDS (1)..(1443): homologue/similar gene in O. sativa: Xa21_Os08g0526100
atgatgccgcactgcggcgtggtggacgcggcggcgaagggggtgaagctggggggcggtggtggcggggcgctgatggtgcgccgggtggcgagcggcaagctcctgtcggcgtcgtcgcacctgctgttccgcgccaccgtactcgccacgctggcgcttgtgttcctcttcacgttccactacccgtcgctgctgtcgcgctccttcacgctctcctccggcgccggcggcggcgaggggggagccgcggcgcacgcctcgcaccggagcttgctcatgtcgtcgtcgtcggcgtcggcggcgtcggtgtacgggggcgcggcgtgggagaaggaggtgaggcggagcgcgaagccgaggaaggacggggggatcgccgtgctggtgaccggcgcggcggggttcgtcggcacgcactgctcgctggcgctcagggcgcgcggcgacggcgtgctggggctcgacaacttcaacgcctactacgacccggagctgaagcgcgcgcggcagaggctcctcgccggccgcggcgtgctcgtgctcgacgccgacatcaacgacgcgctcctgctcgagaagctgttcgacctggtgccgttcacccacgtgctgcacctcgccgcgcaggccggcgtgcgctacgccatggaggcgccgcagacgtacgtggcgtccaacgtcgcggggctcgtgaccgtcctcgaggtcgctgccaagcacgccgacccgcagccggcgatcgtctgggcgtcgtcgtcgtcggtgtacgggctcaacaccgacgcgcccttctccgaggagcaccgcaccgaccggccggcgtcgctgtacgcggcgaccaagaaggccggcgaggccatcgcccacgcgtacaaccacatctacggcctctccatcaccggcctccgcttcttcaccgtgtacggtccatggggccgccccgacatggcctacttctccttcgcccgcagcatcgtcgccggcgagcccatcacgctgttccgcaccgccgacggcgccgacgcgcgccgcgacttcacctacatcgacgacgtcgtcaagggctgcctcggcgcgctcgacacggccggcgagagcaccggcaccaagtccggcaagaagcgcggcccggcgccgctccgcgtctacaacctcggcaacacctcgccggtgccggtcacccgcatggtcgccatcctcgagaagctcctcggcaggaaggcgaacaagcgcgtcgtcaccatgccgagcaatggcgacgtgccgttcacccacgccaacgtcagccacgccgcgcgcgacttcggctaccgcccggcgacctccctcgacgccggcctccgccgcttcgtcgactggttcgtccactactacaagctcgacacggccaagatcgccaagggcaagaggaaatccatggccatgtccgccgcgtcgtga

SEQ ID NO: 258 - protein, 480 aa, Oryza longistaminata
MMPHCGVVDAAAKGVKLGGGGGGALMVRRVASGKLLSASSHLLFRATVLATLALVFLFTFHYPSLLSRSFTLSSGAGGGEGGAAAHASHRSLLMSSSSASAASVYGGAAWEKEVRRSAKPRKDGGIAVLVTGAAGFVGTHCSLALRARGDGVLGLDNFNAYYDPELKRARQRLLAGRGVLVLDADINDALLLEKLFDLVPFTHVLHLAAQAGVRYAMEAPQTYVASNVAGLVTVLEVAAKHADPQPAIVWASSSSVYGLNTDAPFSEEHRTDRPASLYAATKKAGEAIAHAYNHIYGLSITGLRFFTVYGPWGRPDMAYFSFARSIVAGEPITLFRTADGADARRDFTYIDDVVKGCLGALDTAGESTGTKSGKKRGPAPLRVYNLGNTSPVPVTRMVAILEKLLGRKANKRVVTMPSNGDVPFTHANVSHAARDFGYRPATSLDAGLRRFVDWFVHYYKLDTAKIAKGKRKSMAMSAAS

SEQ ID NO: 259 - DNA, 672 bp, Oryza longistaminata
  CDS (1)..(672): homologue/similar gene in O. sativa: Xa21_Os09g0115500
atggacgccacgctgctccgctccgccgatgccgccgtcgccgtccgctccaccaccattgcgcctccgcctcgccctcgcctccaccgccccctcccgtcctcctgcgcctgcgggcccctccgcgcctacgccgctcccgctgcccccgcgcccgccgcgcacaacaacggagtctacacagttggtgacttcatgaccaaaaggcctaatctccatgtcgttacacctgcaacctcggttgatgaagctctcgagacgctggtgcaacacaagatctccggtttccctgttgttgatgacaccggaaagttggtgggtgttgtctcagattatgatctgttagcacttgactcaatatcaggaagtggactgactggcacaaacacaagcatgtttcctgaggtggatagtacttggaagacatttcgcgagatacagagactcttgagcaaaaccaatggcaaagtcatcgctgatgtgatgacttattcgcctcttgcggttcgtgaaagtaccaaccttgatgctgctacaaggttgctacttgaaaccaaatatcgcagattgcctgttgttgatagcactggtaaattggttgggatgatcacaagggggactgttgtcagagctgccctcaaaataaagaagacagctgaagaaactgcttaa

SEQ ID NO: 260 - protein, 223 aa, Oryza longistaminata
MDATLLRSADAAVAVRSTTIAPPPRPRLHRPLPSSCACGPLRAYAAPAAPAPAAHNNGVYTVGDFMTKRPNLHVVTPATSVDEALETLVQHKISGFPVVDDTGKLVGVVSDYDLLALDSISGSGLTGTNTSMFPEVDSTWKTFREIQRLLSKTNGKVIADVMTYSPLAVRESTNLDAATRLLLETKYRRLPVVDSTGKLVGMITRGTVVRAALKIKKTAEETA

SEQ ID NO: 261 - DNA, 1089 bp, Oryza longistaminata
  CDS (1)..(1089): homologue/similar gene in O. sativa: Xa21_Os09g0334500
atggagagcatggagggcaatggaggagggcggctggtggtgaccgagctgagccacatcaaggagctcgtgaggcagctggaggggcacctgggtggctccggctcccccgacctctgcaagcacctggcctcgcagatcttctccgtcaccgagcgctccatcggcatgatcaggtccggccacttcgacggccaccgcaagcgctccgccgccgctgtcgccgccggtgacctcgactcggcgacccccagccccctcagcgacgtctccgacttgcctttcaaggccaccaagaagaggaagacgtcgacggagaagaagaggcatcagattagggtgagctcgacgggaggggtggagaacccaccggtggatgatggccatagctggagaaagtatgggcagaaagagattcttggagccaagcacccaaggggttactaccgttgcacccaccgcaactcgcagggatgcatggcgacgaagcaggtgcagcgcaccgacgaggacccgacggtgttcgacgtgatctaccacggcgagcacacgtgcgtccacaaggcggtggccgccggcgccggcgccggcaagccggagacggagacggacacgaacgccgccgccgagagccgcctccatgacatgagctgcggcctgacggtgaagatcgaggggctgacggcgacgccgccgcagggcggcggcggctggaacgccatgccgccgttctgcctcacgtcgccggtgagcggcctggcgccgccggatcagcacaacccgttctcggcgccgtcgacgccggagaaccgcctcgccgccgccgcgtcgtcggcggcctcgccggcgacctccgactcgatggccgccgcgccgttccaccaggcggcggccggcggcggcgacgcggcgtggcgggacgccgagctccaggaggtggtgtccgcgctcgtcgccgcgacgacgacgacgacggctaccgcgcagccggcgcccgcctccgccatggtcgacgccgacctctccgccctcgacgccttcgagttcgaccccggattcaccattgatatcaccagcttcttcgcatga

SEQ ID NO: 262 - protein, 362 aa, Oryza longistaminata
MESMEGNGGGRLVVTELSHIKELVRQLEGHLGGSGSPDLCKHLASQIFSVTERSIGMIRSGHFDGHRKRSAAAVAAGDLDSATPSPLSDVSDLPFKATKKRKTSTEKKRHQIRVSSTGGVENPPVDDGHSWRKYGQKEILGAKHPRGYYRCTHRNSQGCMATKQVQRTDEDPTVFDVIYHGEHTCVHKAVAAGAGAGKPETETDTNAAAESRLHDMSCGLTVKIEGLTATPPQGGGGWNAMPPFCLTSPVSGLAPPDQHNPFSAPSTPENRLAAAASSAASPATSDSMAAAPFHQAAAGGGDAAWRDAELQEVVSALVAATTTTTATAQPAPASAMVDADLSALDAFEFDPGFTIDITSFFA

SEQ ID NO: 263 - DNA, 2145 bp, Oryza longistaminata
  CDS (1)..(2145): homologue/similar gene in O. sativa: Xa21_Os09g0378700
atgtcgtcgccgccgccgccgccgagcaagccgaagcgccggcggctactgtctcttccggcggtctacccgtgcgaggacatcacgccggcgccgctgctcgcctcgctgctctccctcgcggcggatgtcgcctgccgtcgggcggccgacgtcgacgccttccccgttctccgccgcggcgtgcgcaaggccgtgcggctcgccgggatcctgctcgcgttcctcgaggaggttcaggatgcggcagcggcggggaaggcgacggcgatgccgtcgtctgcggtgcttgggctgacggagctgcacgtggcgatgcagaagctgcggttcctgctcgcggactgcgcgcggcggggcgcgcggctgtgggtgctcgtgaacgccgggatggtggcgtcggagctcaggttggtgctcgggtcggtcgcggcggccatggacgcgcttccgaggagcgtcgcggaggcgtcggtggatgccggggagctcgcgcgggtggtatcggagcaggcgtggcgcgcggtggtgcggcccgacggcgcagacgaacgcgcggcgcggagcgtgcggtcgatcctggatcagttcaaggacggcgtcgcgccggacgccgacgacgtgaggcgggtgctccgccgggtcagggtcgggagctggtcggattgctccgaggagatcgcgttcctggagagcgagatttgcgcgcggctggacgccggcgacgagaacagcaatgacgttatcgtcatgaacagcttaatggcgttcctggtgtactgccgcgtcgtgctgttcgaccacattgacgcgagcaagtcgcaaccggcggcggcggcggcgccggcgccggcgaggtgcccggaatggatcagaccggaagcgctgcagtgcccgatcactctggacctcatgaccgatccggtgaccgtgtccaccggccagacatacgaccgggcgtcgatcacccggtggatgaaggccggttgccgcacgtgcccggtcaccggcgagaggctgagcaccgccgacctcgtccccaacaccgtgctccgcgggatcatcgagcggatgcttctcatcaatggcgtcaccctcccggagccgagcgccgccggcggcggtggccaccgccacggcgccgtcgcgaacacggccgtgccgttcggcctggccgccgcgggggccgcgcgcctcgccgtcgcgcacatcgtggcgcagctctcgagggggtcgacggaggagcggaggaaggcgacgtcggaggcacggaagctgtcgaagcacagcgtgttctaccgggcttgcctcgtcgacgccaacgccgtgccgtggctgctgtgcctcctctcctccaccgacgccgccgtgcaggacaatgccgtggcgtcgctgctcaacctctcgaagcaccccgccggcaggacggccatcgtggaggtcggcggcgtcggcctcgtcgtcgacgtgatcaacgtcggcgccaaggccgaggcgcagcacaacgcggcggccgtcctcttctacctctcgtcgaacagcccggactccgccgaggagatcggccgcatcccggaggcgatcccgacgctggtccagctcatccgggacggcgcgtaccgcgggcggaagaacgccatggtcagcctgtacgggctgctccagagcgccgccaaccacggcagggccatcgccgcgggcgccgtgtcagcgctcgccgcgctgctgctctccgccgaccgcgacgacctcgccggggacagcgtcgcgctgctggcgaggatcgccgagcagccgtctggcgccgcggccgtcctctcgcagccggggctcgtcgctcgcctcgccgaggcgctcgcctccgcctcggcgtcgtcgtcccggtcggcgagagaccacagcgtgtcgctcctcgcctcgctgtgccggcacggcggcgccaaggtggtcgccgtgctggggcggatgccggggctgatggcgtcgctctactcgctcgtcgccgacgggggcagcccgcagacgagcaagaaggcgcgggcgctgctcaacgagatccaccggcattacgaggtggcgccgccgccgccggcgtcgtcggcgtcgtcggacgccggcggtgaccgtgtcgttcgcgtgctatag

SEQ ID NO: 264 - protein, 714 aa, Oryza longistaminata
MSSPPPPPSKPKRRRLLSLPAVYPCEDITPAPLLASLLSLAADVACRRAADVDAFPVLRRGVRKAVRLAGILLAFLEEVQDAAAAGKATAMPSSAVLGLTELHVAMQKLRFLLADCARRGARLWVLVNAGMVASELRLVLGSVAAAMDALPRSVAEASVDAGELARVVSEQAWRAVVRPDGADERAARSVRSILDQFKDGVAPDADDVRRVLRRVRVGSWSDCSEEIAFLESEICARLDAGDENSNDVIVMNSLMAFLVYCRVVLFDHIDASKSQPAAAAAPAPARCPEWIRPEALQCPITLDLMTDPVTVSTGQTYDRASITRWMKAGCRTCPVTGERLSTADLVPNTVLRGIIERMLLINGVTLPEPSAAGGGGHRHGAVANTAVPFGLAAAGAARLAVAHIVAQLSRGSTEERRKATSEARKLSKHSVFYRACLVDANAVPWLLCLLSSTDAAVQDNAVASLLNLSKHPAGRTAIVEVGGVGLVVDVINVGAKAEAQHNAAAVLFYLSSNSPDSAEEIGRIPEAIPTLVQLIRDGAYRGRKNAMVSLYGLLQSAANHGRAIAAGAVSALAALLLSADRDDLAGDSVALLARIAEQPSGAAAVLSQPGLVARLAEALASASASSSRSARDHSVSLLASLCRHGGAKVVAVLGRMPGLMASLYSLVADGGSPQTSKKARALLNEIHRHYEVAPPPPASSASSDAGGDRVVRVL

SEQ ID NO: 265 - DNA, 849 bp, Oryza longistaminata
  CDS (1)..(849): homologue/similar gene in O. sativa: Xa21_Os09g0491756
atggccgagcacctcgcttccatctttggcacggagaaggaccgcgtgaactgccccttctacttcaagatcggcgcgtgccgccatggcgaccgatgctcccgcctgcacaacaagccgtcggtctcgccgacgcttctgctctccaacatgtacctgcgcccggacatgatcacccccggaatcgacgcgcagggcaaccccatcgaccccgagaagatccaggccgacttcgaggatttctacgaggacatctttgaggaactcagcaagtacggcgagatcgagagcctccacgtgtgtgacaacttcgctgaccacatgatcggcaatgtgtatgttcaattcagggaggaggatcaggccgccagagcgctgcaggcgctgacggggcggtactactccggccgccctatcattgtcgagttctcgtcggtgaccgatttccgggaggccacctgccggcaatatgaagagaacagctgcaaccgtggtgggtactgcaacttcatgcacgtcaaggagatcggcagagacctgaggaagaggttgtttgggcacctgcataggtcccggagaagccatagccatggccggagccgcagcccgagcccgtaccattaccggagggactatgatcggaggagctcatcgcggtccagggaccgtgatgattactaccgtggaggtagctggaggagcagcgagaggcaccgcagcagctacgacagcgatggcagcaggcggcggcacaggtccaggactaggagtcctgtcagggatggtagcgaggagaggagagctcggattgagcagtggaaccgtgaaagggaggctgcacatgtgtga

SEQ ID NO: 266 - protein, 282 aa, Oryza longistaminata
MAEHLASIFGTEKDRVNCPFYFKIGACRHGDRCSRLHNKPSVSPTLLLSNMYLRPDMITPGIDAQGNPIDPEKIQADFEDFYEDIFEELSKYGEIESLHVCDNFADHMIGNVYVQFREEDQAARALQALTGRYYSGRPIIVEFSSVTDFREATCRQYEENSCNRGGYCNFMHVKEIGRDLRKRLFGHLHRSRRSHSHGRSRSPSPYHYRRDYDRRSSSRSRDRDDYYRGGSWRSSERHRSSYDSDGSRRRHRSRTRSPVRDGSEERRARIEQWNREREAAHV

SEQ ID NO: 267 - DNA, 669 bp, Oryza longistaminata
  CDS (1)..(669): homologue/similar gene in O. sativa: Xa21_Os09g0522000
atggaggcggaggaggcgacgtacaggacggtgtggtcggagccgccgaagaggccggcggggaggaccaagttcagggagacgaggcacccggtgtaccgcggcgtgcggcggcgcggggggcggccgggcgcggcggggcggtgggtgtgcgaggtgcgggtgcccggggcgcgcggctccaggctgtggctcggcacgttcgccaccgccgaggcggcggcgcgcgcgcacgacgccgccgcgctggcgctccgcggcagggccgcctgcctcaacttcgccgactccgcgtggcggatgccgcccgtccccgcgtccgccgcgctcgccggcgcgaggggggtcaaggccgccgtcgccgaggccgtcgaggcgttccagcgccagtcgcagcccgtgtccacggcgccgtcgtctccggcggagaccttcgccgactacggcgacgaagaggaagacaacaaggacgtgttgccggcggtggcgacggtgcccggcgacgcgggggcgttcgagctcgatgacgggttcaggttcggcgggatggacgccgggtcgtactacgcgaacttggcgcaggggctgctcgtcgagccgccgggcgccggagcgtggtgggaggacggcgagctcgccggctccgacatgccgctctggagctactaa

SEQ ID NO: 268 - protein, 222 aa, Oryza longistaminata
MEAEEATYRTVWSEPPKRPAGRTKFRETRHPVYRGVRRRGGRPGAAGRWVCEVRVPGARGSRLWLGTFATAEAAARAHDAAALALRGRAACLNFADSAWRMPPVPASAALAGARGVKAAVAEAVEAFQRQSQPVSTAPSSPAETFADYGDEEEDNKDVLPAVATVPGDAGAFELDDGFRFGGMDAGSYYANLAQGLLVEPPGAGAWWEDGELAGSDMPLWSY

SEQ ID NO: 269 - DNA, 1350 bp, Oryza longistaminata
  CDS (1)..(1350): homologue/similar gene in O. sativa: Xa21_Os09g0526600
atggcggagcagggggcgggagaggcggatgcgggcggcggtggcgggggaggggagccgccgccgccggcggtgatgacggcggcggcggaggcgctggcggggcagaggtcgctgccgacgccgttcctgacgaagacgtaccagctggtggaggacccggcggtggacgacgtgatctcgtggaacgaggacgggtcgacgttcgtggtgtggcggccggcggagttcgcgcgggacctcctccccaagtacttcaagcacaacaacttctccagcttcgtgcgccagctcaacacctatggatttaggaagatcgtgccggaccggtgggagttcgccaacgactgcttccggcgaggggagaagcgtttgttgtgtgatatacaccgccggaaggtggcggcggcggcggcggcggcgccgacggcagctgccgcggtggcttcgggagctgtgacggtggccgcggcgccgatacctatggcgctgccggtgacgcgggcgggctcgccggcgcactcctcggaggagcaggtgctgtcgtcaaactccgggtcgggggaggagcaccggcaagcgtccgggtccggctctgcgcccggcggcggcggcggcggctccgcgtccggcggcgacatgggcgaggagaacgagcggctccggcgggagaacgcgcggctgacgcgggagctcggccacatgaagaagctctgtaacaacatcctcctcctcatgtccaagtacgccgccacccagcacgtggagggctccgcggggatatcctccatagcgaactgctccggcgagtcgtcggaggccgttcccccgccgccgcctctccccccggcgatactcgatctaatgccctcctgccccgccctggccaccgccgccgccgccgcggggctcgccatagacgtcgagcccgacccgagcgcgcgcctgttcggcgtctccatcggcctgaagcggactcgaggcgacgccgccgccgacgacgaagacggcggcggcgaggatcaggccgagcacggcggcgcggacgtgaagccggaggcggcggatccgcatcccgccggcggcggcggcggaagcagcacggaggcgtcgccggagtcgcacccgtggcccatataccggccaacccccatgtaccacgcggtcaggcccacttgcaacgggccggacagggccgggtccgaccaagacgggtccagctccagccaaacgatggggcctgatgaattcgacggtccgcgaaagacgttggtggtgcaacagagcaacttcatgatgcactgggggcattcggaatgcggtagtggcgcaaggggttttggatggtga

SEQ ID NO: 270 - protein, 449 aa, Oryza longistaminata
MAEQGAGEADAGGGGGGGEPPPPAVMTAAAEALAGQRSLPTPFLTKTYQLVEDPAVDDVISWNEDGSTFVVWRPAEFARDLLPKYFKHNNFSSFVRQLNTYGFRKIVPDRWEFANDCFRRGEKRLLCDIHRRKVAAAAAAAPTAAAAVASGAVTVAAAPIPMALPVTRAGSPAHSSEEQVLSSNSGSGEEHRQASGSGSAPGGGGGGSASGGDMGEENERLRRENARLTRELGHMKKLCNNILLLMSKYAATQHVEGSAGISSIANCSGESSEAVPPPPPLPPAILDLMPSCPALATAAAAAGLAIDVEPDPSARLFGVSIGLKRTRGDAAADDEDGGGEDQAEHGGADVKPEAADPHPAGGGGGSSTEASPESHPWPIYRPTPMYHAVRPTCNGPDRAGSDQDGSSSSQTMGPDEFDGPRKTLVVQQSNFMMHWGHSECGSGARGFGW

SEQ ID NO: 271 - DNA, 438 bp, Oryza longistaminata
  CDS (1)..(438): homologue/similar gene in O. sativa: Xa21_Os09g0565300
atgttcttttctactttcttgctgctgttctggaccatttattcttggactgtacgcctgaatagagatgagatcggcaacctgaggatcaacaactcctgggattcgcagagatatgataccttggatcaggttaaggaagctcttgaaaaggtcggtctcgagtcgtccaatattatcattggagtggatttcaccaaaagcaacgagtggacagggaaacattgtttcaacgggagaagcctgcatcacatttcagaggactccctcaacccgtacgagcaagcgattagtatcatcggcaagaccttatcgacgttcgacgaagacaacaggatcccatgttttggatttggggacagtaagcaaaagcttctccgtcgtcttctagttctttctctctgcatttctctgttgagaaatgaagtgagatactga

SEQ ID NO: 272 - protein, 145 aa, Oryza longistaminata
MFFSTFLLLFWTIYSWTVRLNRDEIGNLRINNSWDSQRYDTLDQVKEALEKVGLESSNIIIGVDFTKSNEWTGKHCFNGRSLHHISEDSLNPYEQAISIIGKTLSTFDEDNRIPCFGFGDSKQKLLRRLLVLSLCISLLRNEVRY

SEQ ID NO: 273 - DNA, 1278 bp, Oryza longistaminata
  CDS (1)..(1278): homologue/similar gene in O. sativa: Xa21_Os10g0497700
atggcgattggtgttggtggctgctgcgccgtgctgctcgcggcgacgctgctcttctcctctccggtcacctcatatgcttatgattccctggatccaaaaggcaacatcacgataaaatgggatgtcatgcaatggactcctgatggctatgctgccgttgtcacactgtccaactaccagcaattccggcacatccagccaccggggtggcagctggggtggacatggcagcagaaggaggtgatctggtccatgtacggcgcgctggccaccgagcagggcgactgctcgatgtccaaggagggcagcaatgtcccccacagctgcaagaaggatcccaccgtcgtcgacctcctcccgggcaccccaatcgacctgcagatcgccaactgctgcaaggctggatcactgagcgcattcagccaggacccggcgaattctgccgcggcgtttcagatcattgtaggtcattctgggaacagcaatgagacggttagggtgccgaagaacttcagtcttatggcgcctggtccggggtatacctgtagccgtgctatgattgtgaagcctagtaggtttttaagtcaggatgggaggagggcgactcaagctctgatgacatggaatgtgatctgcacatactcccaatttcttgcacaaaaggttccatcctgctgtgtttctctctcgtcgttcgacaatgacaaaactgttgactgcccaacatgctcttgtggctgccaaaatgaaaaatctactacaggaaaatgtgtaaagaagaatgcacctgatttgcaatccatcattcacggccctggcagatggacctggcagcctcttctccagtgcacttcacacatgtgcccagtgaaaattaactggcacttgatgctcaaagacaaggaacactacagagtgaaaatcactgtcactaacttgaactaccgcatgaatttcaccgaatggaacctggttgttcagaatcccaacttagatagtatcacccagatatctggcttcaattacaagcctcttatgccatatggaggcggcataaatgatactacgatgctatggggagtaaagtcctacaatgatttgctcatgcaagctggtccgcttggaaatgtgcaaggagaactgattgtgagaaaggattccagggcttcttccactactaacaagggatgggccttccctacccgtgtgtacttcaacggtgataactgtgtgatgccgcctccggatgcatatccggttagtattacggcttag

SEQ ID NO: 274 - protein, 425 aa, Oryza longistaminata
MAIGVGGCCAVLLAATLLFSSPVTSYAYDSLDPKGNITIKWDVMQWTPDGYAAVVTLSNYQQFRHIQPPGWQLGWTWQQKEVIWSMYGALATEQGDCSMSKEGSNVPHSCKKDPTVVDLLPGTPIDLQIANCCKAGSLSAFSQDPANSAAAFQIIVGHSGNSNETVRVPKNFSLMAPGPGYTCSRAMIVKPSRFLSQDGRRATQALMTWNVICTYSQFLAQKVPSCCVSLSSFDNDKTVDCPTCSCGCQNEKSTTGKCVKKNAPDLQSIIHGPGRWTWQPLLQCTSHMCPVKINWHLMLKDKEHYRVKITVTNLNYRMNFTEWNLVVQNPNLDSITQISGFNYKPLMPYGGGINDTTMLWGVKSYNDLLMQAGPLGNVQGELIVRKDSRASSTTNKGWAFPTRVYFNGDNCVMPPPDAYPVSITA

SEQ ID NO: 275 - DNA, 2805 bp, Oryza longistaminata
  CDS (1)..(2805): homologue/similar gene in O. sativa: Xa21_OsJ_34925(Os12g0105375)
atgcttgtcaggttaggcgtcgttgttgtggcctccgtcgcagctttaactcttaagagagccaatagcggcagcaaagatggccaagcaaggaaaagaaaggataaaactcgttactctgaacatggggagaaagaagaagagaaggaagaggttaaaacaatcagcggcataatcaattcagctctttcagatgatgacgacatgctctccgagatcgagagcctcctatcaggggagatcgacatccccctaccaagtgacaggttcgacgtcaaagaacgctctcggtacaacagtgttaactccgagctggagaggctgcgtggacttgtgcgtgagctggaggagagggaggtgaagcttgagggagagctgctggagtactatggcctcaaggaacaggagactgatgttgtagagctacacagacagctcaagatcaagatggtggagatcgacatgctcaaaatgaccatcaactcgctgcaagaggagaggaagaagctgcaggatgacgtcgcccgtggcacaggagccaagagggagctggaggctgcgaggaacaagatcaaggagctgcagcgacagatacagatggaggcgaaccagacgaaagggcagctgatgcttctaaagaaccaggtgatcgcgctgaagtccaaggaggaggaggcagccgtcaaggacgcagaggtgcagaggaagctgaagaagctcaaggagctggaagtggaggtagttgagctgaggaggaagaacaaggagctcttgtatgagaaaagggatctcatcgttaagctggatgcagcacaaggaaaaataacagagagtgatgtagtttcccatgcaagggaggagatcaacaagctgaggcatgcaaatgaagaccttaccaagcaagtagaaggcctacaaatgaacagattcagtgaagtagaagagttggtttacctgcgttgggttaatgcttgtctgagatatgagctccgcaactaccaggcaccgtctgagaaaatttctgctcgtgaccttaacaagaccctgagcccaaaatcgcgtgagagggccaaacttctaatgctggaatatgcaggatcagaacgaggacagggcgacactgaccttgaaactgcttcttctgcaccttcttcacccagaagtgaagacttcgacaatgtttcagttgacagttcttctagcagatacagcttctttggcaaaaggcccaatctgatgcaaaagctcaagaagtggggaaggggcaaggatgacggaagcagcttagcttcaccgacacagtccttcactagtgactccccaaagagtaccagccagaaaccaaaggggcccctagaggctctcatgctcagaaatgcaggagatggtgtgggcattacaacctttggaaagagggaacaagaccccagtgatatcatggatgaggcaaatgttgcatcttcattccatttgatgtcaaagactgtacaaggttttgctgatgacaagtaccccgcttacaaagataggcataaactcgccacagaacgggagaaggcaataaaagagaaggccgagaaagctagggtacaaagatatggcggtgtcaacagttcaggtattgtgccatctccaagatctgcactccctccaaaacttgctcaaataaaggagaaggcttctacagctaatgctgaatccagtgaccaacctagtgataaccagaacaaccctctagttgtgacacaactgaaacttgcaaatattgagaagagagctccaagagttcctaggccacctcctgcaccatcagccactgccacaggagctgccaacactgcaagtgcgttacctccaccaccgccacgccctccaggtgcacctcctccaccaccgcctcctggcaaacctggtggcccgccaccaccgccaccaccccctggttccctacctaggaatcttgctggtggtgacaaggtacaccgtgctccagaggttgtagagttttatcaaagtctcatgaagcgtgaagccaagaaggacacaacttctctgggatcaacaacatcaagtgtctctgatgtgagaagcaacatgattggagagattgagaatagatcaacattcctcttagctgtcaaagcggatgtggagacacaaggagactttgttgagtctctagcaaatgaggtccgagcagctagttttgtaaatatcgacgacgttgttgcatttgtaaattggcttgatgaggaactatccttcttggtcgatgagcgggcagtactaaagcactttgattggccagagagcaaaactgatgcactaagagaggcagcctttgagtatcaagacctgctaaaattagaacacaaggtttcatcgtttactgatgatccaaagctagcatgtgaagaagctctcaagaagatgtattccttgcttgaaaaagtggagcagagtgtttatgcgctacttcgtactagagacatggccatatcacgctacagggagtacggaataccggtggattggctgtctgattccggggtagttggcaagatcaaattggcatctgttcagctggcgaagaagtatatgaagagggttgccacagagcttgatgccttgcaaggcaccgagaaagagcccaacagagagttcttgcttcttcagggtgtgagatttgctttccgagttcatcagtttgctggagggttcgatgaggaaagcatgaaggcatttgaagagctaagaagcaagatgtctacacagacatctgctccacaaatttccgatgtgtag

SEQ ID NO: 276 - protein, 934 aa, Oryza longistaminata
MLVRLGVVVVASVAALTLKRANSGSKDGQARKRKDKTRYSEHGEKEEEKEEVKTISGIINSALSDDDDMLSEIESLLSGEIDIPLPSDRFDVKERSRYNSVNSELERLRGLVRELEEREVKLEGELLEYYGLKEQETDVVELHRQLKIKMVEIDMLKMTINSLQEERKKLQDDVARGTGAKRELEAARNKIKELQRQIQMEANQTKGQLMLLKNQVIALKSKEEEAAVKDAEVQRKLKKLKELEVEVVELRRKNKELLYEKRDLIVKLDAAQGKITESDVVSHAREEINKLRHANEDLTKQVEGLQMNRFSEVEELVYLRWVNACLRYELRNYQAPSEKISARDLNKTLSPKSRERAKLLMLEYAGSERGQGDTDLETASSAPSSPRSEDFDNVSVDSSSSRYSFFGKRPNLMQKLKKWGRGKDDGSSLASPTQSFTSDSPKSTSQKPKGPLEALMLRNAGDGVGITTFGKREQDPSDIMDEANVASSFHLMSKTVQGFADDKYPAYKDRHKLATEREKAIKEKAEKARVQRYGGVNSSGIVPSPRSALPPKLAQIKEKASTANAESSDQPSDNQNNPLVVTQLKLANIEKRAPRVPRPPPAPSATATGAANTASALPPPPPRPPGAPPPPPPPGKPGGPPPPPPPPGSLPRNLAGGDKVHRAPEVVEFYQSLMKREAKKDTTSLGSTTSSVSDVRSNMIGEIENRSTFLLAVKADVETQGDFVESLANEVRAASFVNIDDVVAFVNWLDEELSFLVDERAVLKHFDWPESKTDALREAAFEYQDLLKLEHKVSSFTDDPKLACEEALKKMYSLLEKVEQSVYALLRTRDMAISRYREYGIPVDWLSDSGVVGKIKLASVQLAKKYMKRVATELDALQGTEKEPNREFLLLQGVRFAFRVHQFAGGFDEESMKAFEELRSKMSTQTSAPQISDV

SEQ ID NO: 277 - DNA, 1509 bp, Oryza longistaminata
  CDS (1)..(1509): homologue/similar gene in O. sativa: Xa21_Os11g0213800
atggcggtggcggaagtcgggggaatgcttgcatctgccgtcctcaaggtggcgacccagaagctgggcgccaccatagcgggccgggtcatgctccagtggaacttcgacaaggatctggaggggatgaaggccacgctggagtctgtggacgcggtgctcagggacgccgagaggcggtcgatccgcgacgcggcggtgcggctgtggctgaggaggctcaaggacgccgcctacgacatctccgacatgctcgacgacctggaggccatcacttccaaatcggatgcggggaagttgggatgtatgatgatccccaatctgactattgctcacaagattaccctagctaataagatgaagacgataagtgatgaactgaaggagatcactaatcaacatcttagcttcagattcacggaagatagcagctataaggagcacagagttactgataaacgggaaacatcgtccaaggtggaagaagcacgagttgttgggaggactgcagagaagcggataattatatcttctctgtccaagagaatgactgaagagaccataatccttcctatatatggcattggaggcataggcaagacaaccttggcgaaactggttttcaacgcttccaaattcagagactactctaaggtctggatatatgtgtctcagacatttgacttgaacaaaattagcaactctataatttcacaagtatcggaaagtgagagccagttgactgaaagggagatgataaataggcgtcttgatgagctactttccggtaagaagattctaattgttttagatgacctatgggagagggatcaatttcagttagatgatttgaagactatgttaaaggttggcaggggcagcagggtgattgccatcgtaaccacccgagataaggacattgcagagaagatttgcaccactgaaccgtacaaactagaacccctgacagatgacatgtgctggaaaataataaaagaaaagagtgtctttgaagcaagagatgacaaagaacaattggagaatataggaagggaaatagcatctaagtgtggaggtgtggctttagcagccaaatcacttggatatactctgcaacccatgaagtttgatgaatgggtatcagtgagaaacaacgatatctggaaggcatctactttcgaatgtacatctttgccatatcataatgtgcttgcatccttgcaattgagctgcagcaatatgcctccaaacctgaggttatgctttgcatattgtgcaatctttccaaaaggtcacatcatagtaaaagaccaaataattcaccaatggaatgctcttggtttcatagagcaatctgacatattctctactaggcagcttggtgaggcatatgttagacagcttttggggttgtgcttccttcaacaaacaaaggctccttcagtgagtttctacttaccacatgcatctatagctgaacagctttatcatttctttattagcctatag

SEQ ID NO: 278 - protein, 502 aa, Oryza longistaminata
MAVAEVGGMLASAVLKVATQKLGATIAGRVMLQWNFDKDLEGMKATLESVDAVLRDAERRSIRDAAVRLWLRRLKDAAYDISDMLDDLEAITSKSDAGKLGCMMIPNLTIAHKITLANKMKTISDELKEITNQHLSFRFTEDSSYKEHRVTDKRETSSKVEEARVVGRTAEKRIIISSLSKRMTEETIILPIYGIGGIGKTTLAKLVFNASKFRDYSKVWIYVSQTFDLNKISNSIISQVSESESQLTEREMINRRLDELLSGKKILIVLDDLWERDQFQLDDLKTMLKVGRGSRVIAIVTTRDKDIAEKICTTEPYKLEPLTDDMCWKIIKEKSVFEARDDKEQLENIGREIASKCGGVALAAKSLGYTLQPMKFDEWVSVRNNDIWKASTFECTSLPYHNVLASLQLSCSNMPPNLRLCFAYCAIFPKGHIIVKDQIIHQWNALGFIEQSDIFSTRQLGEAYVRQLLGLCFLQQTKAPSVSFYLPHASIAEQLYHFFISL

SEQ ID NO: 279 - DNA, 1851 bp, Oryza longistaminata
  CDS (1)..(1851): homologue/similar gene in O. sativa: Xa21_OsI_00118(Os11g0669100)
atgcacccgaagcgtccgctgccggcacaggcgccaccagctgggctcgtcctggtgcccgcgcccaagcgcccgcatgtggatgctgctgccggcggcggcgtggcgtcgccgcgggggaagcggcagcttcgctccggcatgctcgtcctcttcttcgtcgcgcaagtcaaggaggagatgagatacaaccagcgacttcgtcgagtgatacgtggagagaatgctatttcccagcaaagggcaatccaagcatttgattgtgtctttcagaaagcatttgacaatgccttccagaagcatcttgatccgatttaccgctcccttcaatcccttaacaagcgcactgatattctcagccatgaagtggaacaaatcaaacattcaaattctaaccatcatgctaatcagcaatacagatcaaaggtaaatcaagagtctgctgccatcactgaggaagtgaatcaagaacaaacagctgctagatttgtcgcgcgtgaagctcaggaggggcaaagagttgagttgaggttcctcaataagttgaaccctctcgtttttacaaaggaaaaaattacagcggaggatggtacaactatcaaaattgccatagttagggataatcagataattacatctggtccactttcttctgcaagaattgaaattttggctctccatggtaacttttatgatgttgtgcctgataattggaccgaatctgagtttgatcaccgcatagtaagtagttcacaagggcccgcgttaggaggagtttgtcaggtcaagctgaagaatggggaggcctctccttctgatgtatttttcaatataccatcttcgaagactgaaagtggaaggctcattctagcagcaaaagttcatacaagtgacaatggtgggtttcgaattaaggaagctgtgatgatgaatcctgttgtggtgcaggtttaccgaaacaaactaaatagaagtagtgaccgtccgaagctaaaagatgaagtacatcgtttaaagggaatttcaggaaagggatgccgcaccaaatggcttaaagataatcaaatcaacactgtggaagagttcgtaaaggctttaaataaggatgaagaaaagatccgcaatgagtgtttcaagctaaagaaggataataagctttggaaagatacaattaaacatgctaaagagtgtgatcttgaagggaattgcaagctgaaattatatagagctgaagagcagcatgttgtactcttctttaactgcgtgcatgacctcgttggtgcgaaatttcgtgatcactatgttgcaaaggacaatttcagttcagatcaacaggatgcagtgaatcgtttgaagaaacaagcatatgatgagctggatagcattggctttgatcacgaaatgaaaaataactatccggtgatgacgctcagtgatgatgcttacattcccttcactgacacagcacaaaatcctccagatttgcatgttacatttcaagttcaaggtattgcagcagctgagatttatcatgaacatgaactgcctcaagcatttcctaacaacaataatgattttggacaagactttttacatggctttcaaggtgctctgactcagatggaccatgactatgcccaatttggcattgctgatatgcagtgttatactacacgggcacctgaaggtacctcttatggaggcaacaacatgatcggaccagcaaatgtaccgcagaatgttattggtgacggctctatggacatgtttgactgttatgcatacatcgttccggacaatgagaaccagaatgagaggcctcatagctctgcatatccaggaccagtttaa

SEQ ID NO: 280 - protein, 616 aa, Oryza longistaminata
MHPKRPLPAQAPPAGLVLVPAPKRPHVDAAAGGGVASPRGKRQLRSGMLVLFFVAQVKEEMRYNQRLRRVIRGENAISQQRAIQAFDCVFQKAFDNAFQKHLDPIYRSLQSLNKRTDILSHEVEQIKHSNSNHHANQQYRSKVNQESAAITEEVNQEQTAARFVAREAQEGQRVELRFLNKLNPLVFTKEKITAEDGTTIKIAIVRDNQIITSGPLSSARIEILALHGNFYDVVPDNWTESEFDHRIVSSSQGPALGGVCQVKLKNGEASPSDVFFNIPSSKTESGRLILAAKVHTSDNGGFRIKEAVMMNPVVVQVYRNKLNRSSDRPKLKDEVHRLKGISGKGCRTKWLKDNQINTVEEFVKALNKDEEKIRNECFKLKKDNKLWKDTIKHAKECDLEGNCKLKLYRAEEQHVVLFFNCVHDLVGAKFRDHYVAKDNFSSDQQDAVNRLKKQAYDELDSIGFDHEMKNNYPVMTLSDDAYIPFTDTAQNPPDLHVTFQVQGIAAAEIYHEHELPQAFPNNNNDFGQDFLHGFQGALTQMDHDYAQFGIADMQCYTTRAPEGTSYGGNNMIGPANVPQNVIGDGSMDMFDCYAYIVPDNENQNERPHSSAYPGPV

SEQ ID NO: 281 - DNA, 831 bp, Oryza longistaminata
  CDS (1)..(831): homologue/similar gene in O. sativa: Xa21_Os09g0425900
atggcgttccggctgagcaacagcctgctcgggatcctgaacgcggtgacgttcctcctgtcggtgcccgtgctgggcggcggcatctggctggcgacgcgcgccgacggcacggagtgcgagcgctacttctcggcgccggtgatcgcgttcggggtgttcctcctcctcgtctccctggcgggcctcgtcggcgcctgctgccgcgtcaactgcctcctctggttctacctcgtcgccatgttcgtcctcatcgtcgtcctcttctgcttcaccgtcttcgccttcgtcgtcaccaacaagggcgccggcgaggccgtctccggcagagggtacaaggagtacaggctcggcgactactccaactggctgcagaagcggatggagaacagcaagaactggaacaggatcaggagctgcctccaggactccaaggtctgcaagaaactgcaggacaagaactgggatcggacccagttcttcaaagccgacctctccccgctcgagtccggatgctgcaagccacccagcagctgcaacttcctctacgtcagcggcacgaactggacgaaggtgcccaccaactcgtcggacccggactgcaacacgtgggtcgacgacggcacgcagctgtgctacaactgccagtcgtgcaaggccggcgcggtggcgaccctgaagcgggactggaagcgcgtcgccgtcgtctgcatcgtcttcctcgtcttcatcgtcatcgtctactccctcggctgctgcgcgttcaggaacaaccggagggacaaccgcggcgcctaccgcggtgccgcgtggaagggcggatacgcctga

SEQ ID NO: 282 - protein, 276 aa, Oryza longistaminata
MAFRLSNSLLGILNAVTFLLSVPVLGGGIWLATRADGTECERYFSAPVIAFGVFLLLVSLAGLVGACCRVNCLLWFYLVAMFVLIVVLFCFTVFAFVVTNKGAGEAVSGRGYKEYRLGDYSNWLQKRMENSKNWNRIRSCLQDSKVCKKLQDKNWDRTQFFKADLSPLESGCCKPPSSCNFLYVSGTNWTKVPTNSSDPDCNTWVDDGTQLCYNCQSCKAGAVATLKRDWKRVAVVCIVFLVFIVIVYSLGCCAFRNNRRDNRGAYRGAAWKGGYA

SEQ ID NO: 283 - DNA, 918 bp, Oryza longistaminata
  CDS (1)..(918): homologue/similar gene in O. sativa: Xa21_Os09g0456800
atggctgctgctgaggcggcggcggcggcggcggtggggaagcagcagcagaagggcggcgggggaaggggaggaggcggcggcgggccggcgccgttcctgacgaagacgcaccagatggtggaggagagcgcgacggacgaggtgatctcgtggggaaaggaggggcggtcgttcgtggtgtggaagccggtggagttcgcccgcgacctcctcccgctccacttcaagcactgcaacttctcctccttcgtccgccagctcaacacctacggtttccggaaggtggtgcccgatcggtgggagttcgcgaacggcaacttccggcgaggcgagcaaggcctcctctccggcatccgccgccgcaaggcgacgacgcctcagtcctccaaatcctgcggcagcggcgtcaacgtcgcgttccctccgccgctgccccctctgcccccggcgccgtcggcgaccacgtccagcggcaacgaccgcagctcctcctccgcgtcctcgccgccgcgggcggacatcaccagcgagaacgagcagctcaggaaggacaaccaaacgctgacgacggagctggcgcgggctcggcggcactgcgaggagcttctgggcttcctgtcgcgcttcctcgacgtccggcagctcgatctccggctgctcatgcaggaagacatgcgagcggcggccgccggaggcggcggcggcgagcagcgcgagcaagagcacgcccgggaggagaagtgcgtgaagctgttcggcgtgctcctcgacgacacccatggcgccgccacgaggaagagggcgcggtgcgaggaggcagcggccagcgagcggccgatcaagatgatcaggatcggcgagccgtgggtcagcgttccgtcgtcggggccggcgcggtgtggcggcgacaactga

SEQ ID NO: 284 - protein, 305 aa, Oryza longistaminata
MAAAEAAAAAAVGKQQQKGGGGRGGGGGGPAPFLTKTHQMVEESATDEVISWGKEGRSFVVWKPVEFARDLLPLHFKHCNFSSFVRQLNTYGFRKVVPDRWEFANGNFRRGEQGLLSGIRRRKATTPQSSKSCGSGVNVAFPPPLPPLPPAPSATTSSGNDRSSSSASSPPRADITSENEQLRKDNQTLTTELARARRHCEELLGFLSRFLDVRQLDLRLLMQEDMRAAAAGGGGGEQREQEHAREEKCVKLFGVLLDDTHGAATRKRARCEEAAASERPIKMIRIGEPWVSVPSSGPARCGGDN

SEQ ID NO: 285 - DNA, 558 bp, Oryza longistaminata
  CDS (1)..(558): homologue/similar gene in O. sativa: Xa21_Os01g0949500
atggtcaagatcaagatgcccgccctgttccgccgccggagcggctccaagtcgccgccgctgccgcaggccgacccggcgtccggcggcgggtccccggcgccgacgccggaggaggagatggagcgggtgttccgcaagttcgacgccaacggcgacggccggatctcgcggtccgagctcggcgcgctgttcgagagcctcggccacgcggccaccgacgacgagctcgcccgcatgatggccgaggcggacgccgacggcgacggcttcatcagcctcgacgagttcgccgccctcaacgccaccgccagcggcgacgcggccgccgtcgaggaggacctccgccacgccttccgcgtcttcgatgccgacggcaacggcaccatctccgccgccgagctcgcccgcgtcctccacggcctcggcgagaaggccaccgtccagcagtgccgccgcatgatcgagggcgtcgaccagaacggcgacggcctcatctccttcgaggaattcaaggtcatgatggccggaggcggctccttcgccaagatcgcctag

SEQ ID NO: 286 - protein, 185 aa, Oryza longistaminata
MVKIKMPALFRRRSGSKSPPLPQADPASGGGSPAPTPEEEMERVFRKFDANGDGRISRSELGALFESLGHAATDDELARMMAEADADGDGFISLDEFAALNATASGDAAAVEEDLRHAFRVFDADGNGTISAAELARVLHGLGEKATVQQCRRMIEGVDQNGDGLISFEEFKVMMAGGGSFAKIA

SEQ ID NO: 287 - DNA, 936 bp, Oryza longistaminata
  CDS (1)..(936): homologue/similar gene in O. sativa: Xa21_Os05g0494600
atgagtatgaggcggttgagcggcagcggcaatgccggcggcggcgcggcggtggccggagagtgggatggtggtggtggtggtggcattgcggggaggatgaggggggtgaacgccgggatcatggacgagaaggtgctggagctggtgttccgggcgctgaactgggacccgagggagctgtgcgtggtggcgagggtgagccggcggctgcgggcggtggcggagcgggtgctgtggcgggagctgtgcgtgtcgagggcgccgcggatggtgtcggcgctgtcgggcccgaccgcggcggtggcggcggcggcagggcgcatcgggggaggctggccggcgatggcgaagctgctcttcttctgctgcggcgcggcgggcgccgccgtgccgggccacttcgcgcccgtgtcgcggttctccaagacgtcgggccggagcttcctgtcgcggcggtgcgcgggggacatgctgttcgtgtcggacccgtgcgagcacgccgccgccggcgccgcgcccgacgacgtcgtgggcgcgtaccgcggcgtgtaccgcgggttcatgcggtcgcggacgcgcgccttcctcgtcggccaccgcgccccgctcgagccgcgcgtccgctgcccctactgcggcgcccgcgtgtggagcatgaccgccgcggggctcgcgccgcgcagcgcgagccgccgcctcggcgccaacgagggccgcctcgagtacttcgtctgcgtcagcggccacctccacggcagctgctggctcgcccgcctctcctcctcctcctcctccagcgacggcgagcgcagcgccgactccgactccaaccacagcgacgacgagacgttcgccgccgccgacgtgagcctcccgcttcctccagccggccgcgtgtcagcccggcgccttcgaggcaggcccgccatgtga

SEQ ID NO: 288 - protein, 311 aa, Oryza longistaminata
MSMRRLSGSGNAGGGAAVAGEWDGGGGGGIAGRMRGVNAGIMDEKVLELVFRALNWDPRELCVVARVSRRLRAVAERVLWRELCVSRAPRMVSALSGPTAAVAAAAGRIGGGWPAMAKLLFFCCGAAGAAVPGHFAPVSRFSKTSGRSFLSRRCAGDMLFVSDPCEHAAAGAAPDDVVGAYRGVYRGFMRSRTRAFLVGHRAPLEPRVRCPYCGARVWSMTAAGLAPRSASRRLGANEGRLEYFVCVSGHLHGSCWLARLSSSSSSSDGERSADSDSNHSDDETFAAADVSLPLPPAGRVSARRLRGRPAM

SEQ ID NO: 289 - DNA, 1041 bp, Oryza longistaminata
  CDS (1)..(1041): homologue/similar gene in O. sativa: Xa21_Os05g0560600
atggaggtgagggagatggccgtggcggcggctgcggcggcggcggcgtcgtcagggggaggaggtggggggttgaggatgccgccgcccaaccctaacctgccgtacagggaggattgctggagcgagggcgagacggaggcgctggtccgcgcgtgggggagccgctacgtcgagctcaaccgggggaacctgcggcagaagcagtggcaggaggtggccgacgccgtcaactcgcggcgcggggcggccgcgcgccgccgcccgccgcgcaccgacgtgcagtgcaagaaccgcgtcgacaccctcaagaagaagtacaaggcggagcgcgcccgcgtcatgccatccacctggtccttcttccccgagctcgaccgcctcgtcgggcccaccctctccgcctccgcctccaagaggccctcgccgtcgccgtcgccggtgccgccgccccctcacttcgccatgcccatccatccttccgcggtgaggaagcccccctcgccttcgccgtcgccctctccgccgcctcccatggcgttgccgctgcccagctaccgtcgcgggtctccgctccccgccgccgctcttatccagcaagaggccgcggctgcagccgctgccgcggtgtctgattctgaggactctgaaggccctggtgacaacaacaatcacaacgcgcagcggtcaccgtcgcaatctgtgtcatcgcgctccggcaatagcaacaagcgcagccgccaggaagttgatggtggtttcagggagctggcaagggcgatcgaggcatttgcggagatgtatgagcgtgtggagagtgcgaagcaaaagcaggcgctggagattgagcggcagcgaatagacttcctgaagcagttggaggtcaagcgcatggagaactttgtggatgcacatgtcaagcttgccagggcaaagcgcatcaagaagcatgcagggactgcacccgatggtattggcgcagcggaattggtttcctctgtcgctgcgctgcctttcctctccacctccacctacatatga

SEQ ID NO: 290 - protein, 346 aa, Oryza longistaminata
MEVREMAVAAAAAAAASSGGGGGGLRMPPPNPNLPYREDCWSEGETEALVRAWGSRYVELNRGNLRQKQWQEVADAVNSRRGAAARRRPPRTDVQCKNRVDTLKKKYKAERARVMPSTWSFFPELDRLVGPTLSASASKRPSPSPSPVPPPPHFAMPIHPSAVRKPPSPSPSPSPPPPMALPLPSYRRGSPLPAAALIQQEAAAAAAAAVSDSEDSEGPGDNNNHNAQRSPSQSVSSRSGNSNKRSRQEVDGGFRELARAIEAFAEMYERVESAKQKQALEIERQRIDFLKQLEVKRMENFVDAHVKLARAKRIKKHAGTAPDGIGAAELVSSVAALPFLSTSTYI

SEQ ID NO: 291 - DNA, 591 bp, Oryza longistaminata
  CDS (1)..(591): homologue/similar gene in O. sativa: Xa21_Os09g0526500
atggcgtcgaggacgatgacactggaggtgacggtggtgtccgccgaggaggtcgtgctgccgccgacgaggcgcccgctcggccgcggcgcgtacgcggtggtgcgcacggcggcgtcggcgtcgtcgccggcggcggcggtgtgcacgcgcgtcgacgaggaatcgggcggcgactgcaacgggtacccctactggaaggaggcgctgcgggtggcgttgccggagggggcgcgctggctggacgtcgagatctgccggaggaggccgaacggccaggtggaggcggtggcggcggcgagcgtccccgtcggcgacttcaccgtcggcccgccgggccacctgcattgcctcagctacaggctgttcgacgcctccgggtgcaggacgcgccgcaacggcatcgtcaacatcaccgtcaggaggacggacgtcaagtacaccgcgccgcctcccccgccgccgccggtgaaagctccggcgtactccggcgcgagcgggagcggcggctcttgctacggcgtgccgccggcgggcgcggccatgggtttccccgtcggattcacggccaatggcaaggcctgcgcgtag

SEQ ID NO: 292 - protein, 196 aa, Oryza longistaminata
MASRTMTLEVTVVSAEEVVLPPTRRPLGRGAYAVVRTAASASSPAAAVCTRVDEESGGDCNGYPYWKEALRVALPEGARWLDVEICRRRPNGQVEAVAAASVPVGDFTVGPPGHLHCLSYRLFDASGCRTRRNGIVNITVRRTDVKYTAPPPPPPPVKAPAYSGASGSGGSCYGVPPAGAAMGFPVGFTANGKACA

SEQ ID NO: 293 - DNA, 189 bp, Oryza longistaminata
  CDS (1)..(189): homologue/similar gene in O. sativa: Xa21_Os01g0373700
atgggaggcaagaagaggaaatccggctccagtttgtggttggccgtggcgtcttggttcgcgcgattgggctcaaagatggtggcgagctctggctccgccggtggccgcgcagggtatgatgcggctggcgagatggtcagggcggctaaacatttctccagcgctcacaagataaactttggttga

SEQ ID NO: 294 - protein, 62 aa, Oryza longistaminata
MGGKKRKSGSSLWLAVASWFARLGSKMVASSGSAGGRAGYDAAGEMVRAAKHFSSAHKINFG

SEQ ID NO: 295 - DNA, 456 bp, Oryza longistaminata
  CDS (1)..(456): homologue/similar gene in O. sativa: Xa21_OsI_17083
atgacgcttctagcatattcttccggaaatttctggagatctcgtccatctcccacaagccgaacgcaatctgctcgttcgttcctcgcttctgggactacggaactcggattcgaggcatcctgcgcaacttacaagttacaagttacaaatcaagggattcaagatacaggcatcgaattaccattaccaatgaaaggagccgcaaggtttgtggtggaaaatgcaaccaggcaaatcaaacctgtcaatggacttccgaggttgatgacaattactactcctcagaagcatggcaaggaaaataattccaatgattcagtgctcataaaggatgaaaacatcgagccacttgttgcttttagcaggccacctcctttgccaccagttcttggccccttgatcatgctctcacttttcaatatgtcaagcggcggtgatgaaaacaaaaaataa

SEQ ID NO: 296 - protein, 151 aa, Oryza longistaminata
MTLLAYSSGNFWRSRPSPTSRTQSARSFLASGTTELGFEASCATYKLQVTNQGIQDTGIELPLPMKGAARFVVENATRQIKPVNGLPRLMTITTPQKHGKENNSNDSVLIKDENIEPLVAFSRPPPLPPVLGPLIMLSLFNMSSGGDENKK

SEQ ID NO: 297 - DNA, 1206 bp, Oryza longistaminata
  CDS (1)..(1206): homologue/similar gene in O. sativa: Xa21_OsI_07792(Os02g0577700)
atgaccacctgcctgccccacttcaagagcctcctcgccggcctcaaccgctcgcccggcgtcccgccggtcacctgcgtggtggcggacgccggcctcaccttcggcgtcgacgccgcggaggctctcggcgtgccgtgcgcgctgctgtggacggccagcgcctgcggctcgctcggctaccgccattaccgcctcttcatcgacaagggccttgtcccgctcaaagatgcagagcagctgacgaacgggttcctcgacacgccggtggactgggcgttcgggatgagcaagcacgcgcggatcggggacttcccgagcttcctccgcacgacggaccgcgacgacgccatgctcaactacgtgctgcacgagacggaccacatggcggacgcggacgccatcatctacaacaccttcgacgagctggagcagccggcgctcgacgccctgcgcgccgcactccagccggcggccgtctacaccgtcggcccgctcaacctgctcgccgagagcctcgcgccatcgggcggcggcggcgacccgctcgacgcgctgggctccaacctctggagagaggacgacgcctgcctcgtctggctcgacggcagggcgccccggtccgtggtgtacgtgaactacgggagcatcgccgtgatgagcaaccagcagctggtggagttcgcgtgggggctcgccggcagcggctacgccttcctgtgggtgatcaggccagacctggtgaccggcaacgacgcctccgccgcggcgctgccgccggagttcatggaggcgacgaggggcaggggcctcctggcgagctggtgcccgcaggaggcggtgctgcggcacgaggcggtggcgctgttcctgacgcacagcgggtggaactcgacgctggagagcctgtccggcggggtgccgatgctgtcgtggccgttcttcgccgagcagccgaccaactccctgtacaagcgcgcggagtggggcgtcgcgatggacgtcggcggcggcggcggcgtgcggcgggaggcggtggaggcgaggatacgggaggcgatgggaggggagaaggggagtgcgatgaggaagagggcggcggagtggagtgagagcgccgcgcgagcaacgcgactcggtgggagctcgttcggcaacctggactcgctgatcaaagatgtgttgctctctggcaggaggagttag

SEQ ID NO: 298 - protein, 401 aa, Oryza longistaminata
MTTCLPHFKSLLAGLNRSPGVPPVTCVVADAGLTFGVDAAEALGVPCALLWTASACGSLGYRHYRLFIDKGLVPLKDAEQLTNGFLDTPVDWAFGMSKHARIGDFPSFLRTTDRDDAMLNYVLHETDHMADADAIIYNTFDELEQPALDALRAALQPAAVYTVGPLNLLAESLAPSGGGGDPLDALGSNLWREDDACLVWLDGRAPRSVVYVNYGSIAVMSNQQLVEFAWGLAGSGYAFLWVIRPDLVTGNDASAAALPPEFMEATRGRGLLASWCPQEAVLRHEAVALFLTHSGWNSTLESLSGGVPMLSWPFFAEQPTNSLYKRAEWGVAMDVGGGGGVRREAVEARIREAMGGEKGSAMRKRAAEWSESAARATRLGGSSFGNLDSLIKDVLLSGRRS

SEQ ID NO: 299 - DNA, 2571 bp, Oryza longistaminata
  CDS (1)..(2571): homologue/similar gene in O. sativa: Xa21_protkinase
atgctgcccttgcttttctttcctgtattcgtgtttgccacaacgcttcatggagccatcggccaagaagctggctttctaagcatcgactgcggcctagaggacaccagcggctacaaggaagacaagactggcatcatctacgtctccgacggctcctacgtcgatgccggggagaaccaccgtgtgtcggcggaggaagagaacgcgaaattgccacgtccgtacgcgacgctccggagcttcccttccggcatgcggaattgctacacgctgcccgcggacgctggggccaagtaccttgtccgggtggtgtccttctacggcaactacgacgggaagaacagctcatcgtcgttgcagttcgacctgcacctcgggacaaactactgggccactgtccgcgctgacggcaacaacgtgtacgaggcgctgttcgtggcctgggcgagctgggtgccggtgtgtctcgtgaacaccggccgtggcacgccgttcgtgtccgcggtggagctgaggcagctcagcggcgagctctacccgggcctcaatgccagccagtccttgtccatgtatggacggcgcaacatgggttcaaacatttcatatacacgttacccccacgatcgatatgaccggtactggtggcaggtatggtctgatccaatgtggaagaacatttccactccatcaaccatcgaacagagctccatcttcgctttgcccctccccgttatccagaccgcagttgagacggtcagcaataagacaatgctcaacattacatggcaagcggaaacaccccgaggctttttggttttcttgcacttcgccgacttccagaacagtcaattccgacagttcaaggtcgcttttaacaatgactatcgtgataactatagcccaccatacatgaccacagatgccttgtttggcttgacaagggccaccagtggcatgtacagcatcagtattggagccaccgatgcatctaagctgccgccgatgctaaacgcgattgaggcatacactctcatgtcccgtgacaacccaataacgttcccaaacgattttgacactatcatggcaattaaacatgaatacgggataaagaagaattggatgggtgatccatgtttcccaacacaatttgcatgggatggcgtgaaatgcaacaatgcaagtggtaacaatacgaggataatatatttggatctctcgaacaacaacttgcatgggccgatatctaataactttacattgctcacggcactcaagtacctgaatttgtcgggcaaccagctgaatgcacccattcctaagtccctctgtgaaaacaataatacaggatcattgattctcagtttcgattctgaccgagaaacgtgcacaataataccgcctccaacaataaaaaaattgaacaaagcaatcttagctatttcggtagtggttcctgtgatggccattgctattcttgttctcgcttatttgatctggagacagaaaagaaaaccaaacatatcaatagatgatactccgagagaacgacaagctgaaaatgttccagcaagcagaaaaaaccatgggaatgccttgctaatggttgagaatcgccaattcacatacaaggagcttgagaagttaactaataagtttgaacgcttcattggacaaggaggttttggactcgtgtactacggacttatagaagatggtattgaggttgctgtcaagatacgttctgagtcatcgtgtcatggactcgatgaatttttcgctgaggttcaaagtttgacaaaggtgcatcacagaaatctagtttccttggttggttactgctgggagaagaatcatttagcactagtttatgagtacatggctcgaggcactctttgtgatcatctgagaggtaatcatggttttagtgaaaccttgaattggaaaacacgagtccgagttttggttgaagctgcacaaggactggattatctgcataaaggttgtagtccgccaataattcacggagatgtgaagacgagtaacattctgttggatcaaaatttacaagctaaaattgcagattttggtctttccaagacatatcttagcgacacacagacgcacatatcagtcaatccagctgggtcagctggttatatggaccctgggtactttcacacaggcagactcacggagagttgtgatgtttatagttttggaattgttctgttagagatagccaccggcgagtctcccatactaccaggtcaagaccacattattcagcgtgtgaataagaagattgctaccggtaatatcagcttggttgctgatgcacgactcagaggtgcctatgatatcagctcaatgtggaaggtggtggacatcggactgttatgcactactgacactggtgcaaaaaggccgacaatggctgctgtggttgtgcgactcaatgagagccttgcattggaggaagctcattgcgagagtggcttcaggggaagcacaggcacatcgtgtgataccacagtttcaacatctacgtttgggccttcagcaagatga

SEQ ID NO: 300 - protein, 856 aa, Oryza longistaminata
MLPLLFFPVFVFATTLHGAIGQEAGFLSIDCGLEDTSGYKEDKTGIIYVSDGSYVDAGENHRVSAEEENAKLPRPYATLRSFPSGMRNCYTLPADAGAKYLVRVVSFYGNYDGKNSSSSLQFDLHLGTNYWATVRADGNNVYEALFVAWASWVPVCLVNTGRGTPFVSAVELRQLSGELYPGLNASQSLSMYGRRNMGSNISYTRYPHDRYDRYWWQVWSDPMWKNISTPSTIEQSSIFALPLPVIQTAVETVSNKTMLNITWQAETPRGFLVFLHFADFQNSQFRQFKVAFNNDYRDNYSPPYMTTDALFGLTRATSGMYSISIGATDASKLPPMLNAIEAYTLMSRDNPITFPNDFDTIMAIKHEYGIKKNWMGDPCFPTQFAWDGVKCNNASGNNTRIIYLDLSNNNLHGPISNNFTLLTALKYLNLSGNQLNAPIPKSLCENNNTGSLILSFDSDRETCTIIPPPTIKKLNKAILAISVVVPVMAIAILVLAYLIWRQKRKPNISIDDTPRERQAENVPASRKNHGNALLMVENRQFTYKELEKLTNKFERFIGQGGFGLVYYGLIEDGIEVAVKIRSESSCHGLDEFFAEVQSLTKVHHRNLVSLVGYCWEKNHLALVYEYMARGTLCDHLRGNHGFSETLNWKTRVRVLVEAAQGLDYLHKGCSPPIIHGDVKTSNILLDQNLQAKIADFGLSKTYLSDTQTHISVNPAGSAGYMDPGYFHTGRLTESCDVYSFGIVLLEIATGESPILPGQDHIIQRVNKKIATGNISLVADARLRGAYDISSMWKVVDIGLLCTTDTGAKRPTMAAVVVRLNESLALEEAHCESGFRGSTGTSCDTTVSTSTFGPSAR

1. A method of increasing yield, biomass, growth rate, vigor, nitrogen gain derived from biological nitrogen fixation, nitrogen use efficiency, abiotic stress tolerance and/or preferably of increasing tolerance to nutrient deficiency of a plant, comprising introducing isolated genetic material of Oryza longistaminata to a target plant or plant cell.

2. The method of claim 1, wherein the isolated genetic material is selected from the group consisting of the nucleic acid sequences set forth in Table 1 or nucleic acid sequences encoding a polypeptide at least 60% identical to an amino acid sequence encoded by the nucleic acid sequences set forth in Table 1.

3. The method of claim 1, wherein the target plant or plant cell is selected from the group of plants or plant cells, respectively, of
a) family Poaceae,
b) subfamily Ehrhartoidae, Pooideae, Panicoideae or Chloridoideae,
c) tribum Oryzeae, Triticeae, Paniceae or Andropogoneae,
d) genus Oryza, Hordeum, Secale, Triticum, Triticosecale, Saccharum, Eleusine, Sorghum, Pennisetum or Zea; and
e) Oryza sativa, Oryza glaberrima (cultivated rice), Hordeum vulgare (barley), Secale cereale (rye), Triticum aestivum (bread wheat), Triticum monococcum, Saccharum officinarum, Saccharum robustum, Saccharum sinense, Saccharum barberi, Saccharum edule, Saccharum spontaneum (sugar cane), Eleusine coracana, Sorghum bicolor (Sorghum), Pennisetum glaucum (millet), Zea mays (maize), or hybrids thereof.

4. The method of claim 1, wherein the genetic material is introduced by amphiploidization, single chromosome addition/substitution, centric translocation and/or homologous recombination.

5. The method of claim 1, wherein the genetic material of Oryza longistaminata is introduced to the target plant or plant cell by
a) wide hybridization,
b) chemical methods,
c) microinjection,
d) electroporation,
e) particle acceleration and/or particle bombardment,
f) one or more viral vectors or bacterial vectors, preferably Agrobacterium,
g) receptor-mediated mechanisms,
h) injection of genetic material into a reproductive organ of the target plant,
i) protoplast transformation, and/or
j) injection into an immature embryo of the target plant, or
k) two or more of (a)-(j).

6. The method of claim 1, further comprising the steps of:
(i) growing a root and/or shoot of the plant or plant cell obtained by the method of claim 1 inoculated with a nitrogen fixing microorganism or not inoculated in soil;
(ii) determining expression levels of nitrogenase mRNA in the plant roots;
(iii) selecting a plant having higher root-associated expression levels of nitrogenase mRNA than the parental cultivated plant; and
(iv) determining the level of plant nitrogen gained by nitrogen fixation by isotopic, ¹⁵N-based methods.

7. The method of claim 1, wherein the nitrogen fixing microorganism is a bacterium, preferably of family Rhodocyclaceae.

8. The method of claim 1, wherein the introduction of the isolated genetic material to the target plant or plant cell imparts, increases or modifies root association of the plant with a nitrogen fixing microorganism, and/or reduces nitrogen fertilization demand of the plant or the plant cell.

9. A polynucleotide comprising the isolated genetic material of claim 1.

10. A vector comprising the polynucleotide of claim 9.

11. The vector of claim 10, wherein the genetic material is selected from the group consisting of the nucleic acid sequences set forth in Table 1 or encode a polypeptide at least 60% identical to a polypeptide encoded by such nucleic acid sequence and is operably linked to heterologous control sequences capable of directing transcription and preferably expression of the nucleic acid sequences in a host plant cell.

12. A cultivated plant, plant cell or seed thereof comprising the genetic material of claim 1.

13. (canceled)

14. A method for imparting, increasing or modifying root association of a plant with a nitrogen fixing microorganism, reducing fertilization demand of a plant and/or improving nitrogen sustainability of a cereal plant which comprises introducing into the plant the genetic material of claim 1.

15. The method of claim 2, wherein the target plant or plant cell is selected from the group of plants or plant cells, respectively, of
a) family Poaceae,
b) subfamily Ehrhartoidae, Pooideae, Panicoideae or Chloridoideae,
c) tribum Oryzeae, Triticeae, Paniceae or Andropogoneae,
d) genus Oryza, Hordeum, Secale, Triticum, Triticosecale, Saccharum, Eleusine, Sorghum, Pennisetum or Zea; and
e) Oryza sativa, Oryza glaberrima (cultivated rice), Hordeum vulgare (barley), Secale cereale (rye), Triticum aestivum (bread wheat), Triticum monococcum, Saccharum officinarum, Saccharum robustum, Saccharum sinense, Saccharum barberi, Saccharum edule, Saccharum spontaneum (sugar cane), Eleusine coracana, Sorghum bicolor (Sorghum), Pennisetum glaucum (millet), Zea mays (maize), or hybrids thereof.

16. The method of claim 2, wherein the genetic material is introduced by amphiploidization, single chromosome addition/substitution, centric translocation and/or homologous recombination.

17. The method of claim 3, wherein the genetic material is introduced by amphiploidization, single chromosome addition/substitution, centric translocation and/or homologous recombination.

18. The method of claim 3, wherein the genetic material of Oryza longistaminata is introduced to the target plant or plant cell by
a) wide hybridization,
b) chemical methods,
c) microinjection,
d) electroporation,
e) particle acceleration and/or particle bombardment,
f) one or more viral vectors or bacterial vectors, preferably Agrobacterium,
g) receptor-mediated mechanisms,
h) injection of genetic material into a reproductive organ of the target plant,
i) protoplast transformation, and/or
j) injection into an immature embryo of the target plant, or
k) two or more of (a)-(j).

19. The method of claim 3, further comprising the steps of:
(i) growing a root and/or shoot of the plant or plant cell obtained by the method of claim 1 inoculated with a nitrogen fixing microorganism or not inoculated in soil;
(ii) determining expression levels of nitrogenase mRNA in the plant roots;
(iii) selecting a plant having higher root-associated expression levels of nitrogenase mRNA than the parental cultivated plant; and
(iv) determining the level of plant nitrogen gained by nitrogen fixation by isotopic, ¹⁵N-based methods.

20. The method of claim 5, further comprising the steps of:
(i) growing a root and/or shoot of the plant or plant cell obtained by the method of claim 1 inoculated with a nitrogen fixing microorganism or not inoculated in soil;
(ii) determining expression levels of nitrogenase mRNA in the plant roots;
(iii) selecting a plant having higher root-associated expression levels of nitrogenase mRNA than the parental cultivated plant; and
(iv) determining the level of plant nitrogen gained by nitrogen fixation by isotopic, ¹⁵N-based methods.

21. The method of claim 3, wherein the nitrogen fixing, microorganism is a bacterium, preferably of family Rhodocyclaceae.
